United States Patent Application Publication US 2008/0009041 A1 - sequence listing, part 3

SEQ ID NO: 1 - DNA, 4641433 bp, Escherichia coli W3110 (residues 3,094,291-4,641,433 of 4,641,433)
tcgagctgcgggcagtgcgaaggtaacagccgtaacgccagcgaaatgccatgccgttgcgcgaatgcgctgccacgcaatcgctggttttccgccagcgacacggcaaaatccagctgaccattctccagcaatattgcccgctgatcgtcatccagccactcccgcagtagctcttcgacgtccggcgtatcaaacggcgcagcttccattctgccgcgaatgcgccatcgtgcgggccaggcgctgcacaggtgtagatccgagacgttatgctttacactaagggccacaatttcttccatattcatactaagatcctcggaaaatgaacgatattgcgcataacctggcacaggtccgggacaaaatctcagcggctgcaacgcgttgcggccgttctccagaagaaattacgctgcttgcagtcagtaaaacaaaacctgcgagcgccatcgcagaagccattgatgccgggcagcgtcaatttggtgaaaactacgttcaggaaggggtagataaaattcgccactttcaggaactgggcgtaacaggattagaatggcattttattggcccgttgcagtctaataaaagccgcctggtggcagagcatttcgactggtgtcataccatcgaccgtttgcgcatcgctacccgtctcaacgaccagcgcccggcagaacttccccctcttaacgttctgattcaaattaacattagtgatgaaaacagtaagtccgggattcaactggctgaactggacgagctggcagctgcggtcgctgaactaccgcgtttacgtctgcgcgggttgatggcaatccctgcgcctgagtcagaatatgtaaggcagtttgaagttgcacgccaaatggctgtagcatttgccggactgaaaacgcgctacccgcatatcgacacgctctctctgggaatgtcggacgatatggaagccgccattgcggcaggtagcacgatggttcgtatcggcactgcaatttttggtgcgcgtgattactctaaaaaataaggaattaaaggaacgccatgaatacgttgactttcctgctttcaacggtcattgagctgtataccatggtgctgttattacgcatctggatgcagtgggctcattgtgatttttacaaccccttctcacagtttgtagtgaaggtaacgcagccaattatcgggccactgcgccgcgttattccggcaatggggccaattgacagcgcctcgctgctggttgcctatattctcagttttatcaaagccatcgtgctgtttaaagtggtgaccttcctgccaatcatctggattgccggtttactgattctgctgaaaaccatcggcctgctgattttctgggtcctgctggtgatggcgattatgagctgggtaagccaggggcgtagcccgattgaatacgtgctgattcagctggccgatccgctgctgcgcccgattcgccgcctgctaccggcaatgggtgggattgatttctcgccgatgatcctcgttctgctgctgtatgtcatcaatatgggtgtcgcagaagtattacaggcaaccggaaatatgctgctgccagggctgtggatggcgttatgaatgccgtaacagttaatgatgacggtctggttttacggctctatattcagccgaaagccagccgtgattctattgtcggtttacatggcgacgaagttaaagtcgccattaccgcgccgccggttgacggccaggccaacagtcatctggtgaagtttctcggtaagcaattccgggttgccaaaagccaggtggtgattgaaaaaggcgaacttggccgccacaaacaaattaaaatcattaatccgcaacaaatcccgccagaaatcgcggcgttaattaattaggtatcctatgcaaaaagttgtcctcgcaaccggcaatgtcggtaaagtgcgtgagctggcgtcgctgcttagcgacttcggtcttgatatcgtggcccaaacagacctcggcgttgattccgctgaagaaaccggcctgacctttatcgaaaacgcgattctgaaagcgcgccatgcggcaaaagtgaccgctttaccggcaattgccgacgactctggtctggcggtagatgtgcttggcggcgcgccgggcatttactccgcgcgttattccggtgaagacgcgaccgatcaaaagaatctgcaaaaactgctggaaacaatgaaagacgtaccggacgaccaacgtcaggcgcgtttccactgcgtgctggtatatctgcgtcacgcggaagatcccactccgctggtatgccacggtagctggccgggcgtgattactcgtgaaccagcgggcactggtggctttggttatgatccaatcttcttcgtaccttccgaagggaaaaccgccgccgaactgacccgcgaagaaaagagcgccatttcccaccgtggtcaggcgttgaaactgctgctggacgctttacgtaatggttaaattacctccgctgagtctctacattcacatcccgtggtgcgtgcagaaatgcccgtactgcgatttcaactctcacgcgttgaaaggagaagtgccgcacgacgattatgttcagcatctgcttaacgatctggacaacgatgtggcttacgctcagggccgtgaagtaaagacaatctttattggcggtggtacgccgagcctgctttccggcccggcgatgcaaacgctgctggacggcgtgcgtgcgcgtttgccgctggcagcggatgcagaaattactatggaagcgaaccctggcacggtagaagccgatcgctttgtcgattatcagcgtgctggtgtgaaccgcatctctattggtgtgcagagttttagcgaagaaaagctgaaacgacttgggcgtattcatggcccgcaagaagcgaaacgcgcggcgaagctggcgagcggtttagggttacgtagctttaaccttgatttgatgcatgggctgccggatcaatcactggaagaggcgcttggcgatctacgccaggccattgaactgaatccgccgcatctttcctggtatcaactgaccatcgaacccaatacgctgtttggttcgcgaccaccggtgctgccggacgatgacgcgttgtgggatatattcgaacaggggcatcagttattaaccgcagcgggttatcagcaatatgaaacttccgcttacgccaaacccggttatcagtgccagcacaatctcaactactggcgctttggtgactacatcggtattggctgcggcgcacacggcaaagtgaccttcccggatgggcgcattctgcgtaccaccaaaacgcgtcatccgcgtggttttatgcaaggaaggtatctggaaagccagcgtgatgtcgaagccacagataagccgtttgagttctttatgaatcgcttccgtctgctggaggccgcgccgcgcgtggagtttattgcgtataccgggctttgcgaagatgtgattcgcccacagttagacgaggcgattgcccagggttatctcaccgaatgtgcggattactggcagataacggaacatgggaagctgtttttaaattcgctgctggagctttttctggctgagtaaacttgtattgccggatgcggcgtgaacgccttatccagccgacatgtggcagcggttgtaggtctgataagacgcgcaagcgtcgcatcagacgttgattgccggatgcggggtcaacgccgcatcctgctacaaatcgtgcactatatcaaacttacttaatcaccccattgcgccgcagttgttcggtatcttttttccagcgttcattagcttggttgatatcgtcaattttcatcaaaatcgcgacttttttactgtttatttctgaaactttcatcgttaacggatattgccctttttcgagcgttacccagtcatcctgcaatttacggctaagtttttgtgattgcagaaaagtctgtcgccgttgttcgttgatatcgaaatctcgtttctgctgaatcggcacttcataacactcttcactctgtttatgacatgccgcaatcgccggttgataaacctctttgtcatatttaaccgcgaacgcctcgctatcgttctgtttattaaactcatcacgctgttggtgaatttttttaaaggcgtcttcgcgggtcatttgcttaccgtttgcatcttttccccaatatgcatccgctgctttctgcgccgccaccatttgcttatcaagcgctttcacttccttttccagcgcaggaatcgagttcttctgggtattcaacgcagattcaagctgactaaagcgataattgaaatcttcgctattcacgatcagatatttattattcgttttgatatcgtcgaccacccgcccacgatcgctggctgccgcctgaaaagagtaaaagttcaccgaccagccagacgcgggcgttcctttactggttaacatcgccgagaattttaccggtttatctttcgtccaggtctgttcgagcagttcgtaatctgccaactgaccgacccaggtatagagatcgtcactggaagagacatcgccttccgctgaccaggtggcctgattacccttagcatcaagattttttaaggtgatagcatcaagcttgagaatgccgtgatactgctttttgaattgatcttttaagatattttcagttggcggttcgccatctgcccaggcattaccagtcatcaacataagcagtgccgtgccaacaatccattgctttttcacccgaaaaacctcacgcggaataatttattccggtgattatcattagggtaattaaaattggcaatggacgtgagtctgaagtgaaaaagccccggcacgataccggggcgaggcgattagtactgattgaagatctgctggatctgctgcggatctttggtttgcgtcagagccagttgcagcagaacgcgcgctttttgcgggttcagcgtgccagaggcgacgaagccgtatttcgcatcatccacttcggcatcctgagtggtagcgcccgtcggtacgcgggaagaacgcacgactgcagtaccggttttcgcggcggtcgccagcgtgtcgaacacagatttatacaggttgccgttacccacaccagcgctaacgatgccatcatagcccgcatctaccagtgctttagccggaagatcggatgcgttagcgtagttataaacaatgccgactttcggcagttcattcagcttagagacatcgaatggcgtgtcgctggtatgcttacgtgccggggtacgctggtagtcaatcttaccgttgtgaatgtaacccagaggaccgtagttaacagacttgaaggtcgctacgtcggtggtgttggttttggtgacgtcacggccatcaagcacggtgtcattcatcactaccagcacgccacggttggcggaggctttatcagctgcggtcactaccgcgttatacaggttgaatggaccgtctgcgctcatagacgtggacggacgcattgcgccgaccatcaccaccggtttgtcgcatttcaccgtcaggtcgaggaagtaagcagtttcttccatcgtgtcggtaccgtgggtaatgacgaagccgtcggtcttatcgcagtcggtgttaatttttttcgccagtgtcagccagacattatcgttcatgtcctgggagccgatattcactacctgctcgcctttaacgttcgcaatgtcttttagttgcggcaccgcattaaccagattttctacgccaactttacccactgtgtagttagatttggttgcggagtcaccaccaccggcaatggtcccgccggttgctaaaatggtgatattgggtaatgccaatgctgcaccactaaaacccataaccagtgcggcaagtgccgtctttttgaaaaactccatttcattcctccagttacgtgaacgctacgcattatcccttagctctgtatgggaaatttgacgttaaacaatttacaacgtgaatatattttggagatctacaaagttagaggcaggtaacaaaacgaagaattaaacggcataaaaaagtattatgccgtcttaaaatagaggattattttaaattcccgaccagggctttgcggctatcttccagagtcacaacgcggctacaaacatctttgccaaactgctggaaatctttttcctgctttttccactcggtttggattgaggattgcagcccccccaggcttcccagcacattctgtaatgggttaccgccgcttttcagcaccgctttcgcgcccatttcattaatgctgtcctgtaaaattccacccattgcctgattcactaattgctggccttcggcgcgaacctgatcaatggctttatagtgaaacgtcaggccatcgctgcgcgtttcaataatgcggttcatctgctctttcagctgcgcatcaagtttggtcagacggctgcgcattttgctgctttcgcccatctcctgaacgataattttatccagagcaatacgggctttctcgacgcggcttttcgcgccttcatcaatccacggcagcgtgctgcgtagttcagcctgataatccttcgcctgctcgcgctgggcggcattcagggaatattgcttaccgttatacatcacgttgccgtctggcgtgatcaccagattgccgttttcgcccttcacctgcacggtttgcgggctgacaatcacatcgtcacgcggcgtgacgctgcactggtagtcggcgtgagcggtcattgccgtcactgaaagtgctgccgccagcagcattttgcgcatcatagtcttccctcaagaaaaatcaggccagcatttgctggccccagattgataacaaagtacgcgttttccatgccggatgcggcgtaaacaccttatcccgcctactcgatcgtgcatctttccaggcctgataagcgtagcgcatcaggcagttttgcatttgtcatcgcccgtatgctttcttagtcccaccaaacgtcgaaaagttcgctggtgcgtacctcatccagtttgcgctcttccagccacttacgcacaatcgcctgatgttcttcggtgcatttgccgatttcctgcatgcagatcagaccttcccaggccagataaccgctgccgtcaaaggccagtttgttcggttcgataacctcgttaataaaatcatcaacggttttatcaatctgttcttccgatgtaccttccgggaatcgccatgccaccgaaaatcctaattcctggaattcgtcgatgtgcatttttttacgcagacgacggctacggttctttgccattatttcaccctctcgaacattaagtcccatactccgtgaccaagacgatgaccacgttgttcaaatttcgtcaccggacgtgatgccggacgcggtacgtaatcattgctctctgacaggtttttataaccgtcaatagaagacatcacttcaagcatatgttccgcataaggttcccagtcggtcgccatatggaatacgccccccagctgcagtttgctttttaccagttcggcaaacggcacctgaacgatacggcgtttattatggcgcgctttgtgccacgggtcagggaaaaagagctgcaccatgcgcaatgaattgtcaggaatcattttatgcagcacttcaaccgcatcgtgacacatcacgcgcaggttgcttaaaccttcttcatgcgcagaagccaggcacgcaccaacgcccggtgaatgcacttcaatgccgaggaagtcctgctcagggcgatctttagccattgccaccagcgacgcccccatgccaaaaccaatctcaagcgtcaccggcgcttcacggccaaaaagcgcggggaaatccagcatatcttcgctgaactcaacgcccatcaccggccagtagttttccagcgcatgttcctggcctttggtcagtcgcccctggcggcgcacaaaactacggatacggcgcagtgggcggccgttttcatcaaattccggtgaaatgacgtcgtttttcataaaggtttagtcgcttgtgaaagtgttctgaaaacgggcattatccaaagttagttgccggatgcaagcatgataaggccgtggctgcggaaagttccggtttacaccctgccgtcgctgtgctgcaatcttgcccccaacaacagtgaattcggtgaccatgcaagcgtcgcaattttcagcccaggttctggactggtacgataaatacgggcgaaaaactctgccctggcaaattgacaagacgccctacaaagtatggctctcagaagtgatgttgcaacaaactcaggttgcgaccgttatcccctattttgaacgctttatggcgcgcttcccgacggtgaccgatctcgccaatgcgccgctcgacgaagttctccacttgtggaccgggcttggctattacgcccgcgcgcgcaatctgcataaagcggcacaacaagtggcgaccttacacggcggtaaattcccggaaacctttgaggaagttgcagcactgccgggcgtcgggcgttccaccgcaggcgcgattctctcgctttctctgggtaagcactttccgattctcgacggtaacgtcaaacgcgtgctggcgcgctgctatgctgtaagcggctggcctgggaaaaaagaggtcgagaataaattatggagtttgagcgagcaggtgacgcccgcggttggcgtggaacggtttaatcaggcgatgatggatttgggtgcgatgatttgtacgcgctcgaaaccgaaatgttcgctctgtccgctacaaaacggatgtattgccgccgccaacaatagctgggcgctttatccgggcaaaaaaccgaaacagacgctgccggagcgcaccggctactttttgctattacagcacgaagatgaagtattgctggcgcagcgtccgccgagcggattgtggggcggtttatactgtttcccgcagtttgccgacgaagaaagtttgcggcagtggctggcgcaacggcagattgctgccgataacctgacgcaactgaccgcgtttcggcataccttcagccatttccacttagatattgtgcctatgtggcttcccgtgtcgtcattcaccggctgcatggatgaaggcaatgcgctctggtataacttagcgcaaccgccgtcagttggcctagcggctcccgtggagcgtttgttacagcagttacgcactggcgcgccggtttagcgcgtgagtcgataaagaggatgatttatgagcagaacgattttttgtactttcctgcaacgtgaagcagaaggtcaggattttcagctgtaccccggcgagctgggaaaacgcatctataacgagatctccaaagaagcctgggcgcagtggcagcacaagcaaaccatgctgattaatgaaaagaaactcaacatgatgaatgccgagcaccgcaagctgcttgagcaggagatggtcaacttcctgttcgagggtaaagaggtgcatatcgagggctatacgccggaagataaaaaataaaaacagtgccggagcacgcctccggcaacttgcataaaaacaaacacaacacgcacccggaatgatgaaaaaatatctcgcgctggctttgattgcgccgttgctcatctcctgttcgacgaccaaaaaaggcgatacctataacgaagcctgggtcaaagataccaacggttttgatattctgatggggcaatttgcccacaatattgagaacatctggggcttcaaagaggtggtgatcgctggtcctaaggactacgtgaaatacaccgatcaatatcagacccgcagccacatcaacttcgatgacggtacgattactatcgaaaccatcgccgggacagaacctgccgcgcatttgcgccgggcaattatcaaaacgttattgatgggtgacgatccgagttcggtcgatctctattccgacgttgatgatattacgatttcgaaagaacctttcctttacggtcaggtggtggacaacaccgggcagccgattcgctgggaaggtcgcgcaagcaacttcgcggattatctgctgaaaaaccgtctgaagagcgcgcagcaacgggctgcgtatcatctacagcgtcaccattaacatggtgccgaaccaccttgataaacgtgcgcacaaatatctcggcatggtccgccaggcgtcacggaaatatggcgttgatgagtcgctgattctggcaattatgcagaccgaatcttcctttaacccgtatgcggtcagccgttccgatgcgctgggattaatgcaggtggtacaacatactgccgggaaagatgtgttccgctcgcaggggaaatccggcacgccgagccgcagtttcttgtttgatcctgccagcaatattgataccggcaccgcgtatctggcgatgctgaacaatgtttatctcggcggaattgataacccaacatcgcggcgttatgccgtcatcaccgcctataacggcggcgcaggcagcgtgctgcgagtcttttcgaatgataagattcaggctgccaatattattaacaccatgacgccgggcgatgtttatcagacgctgacgacccgccatccctctgcggaatctcgccgttatctttataaagtgaataccgcgcaaaaatcctaccgccgccgataattccattaaccgcccctgacgatgctcaggggcaaaaatgttatccacatcacaatttcgttttgcaaattgggaatgtttgcaattatttgccacaggtaacaaaaaaccagtccgcgaagttgatagaatcccatcatctcgcacggtcaaatgtgctttttcaaacactcatccgcatcacgatgtgaggaaattaacatgaatcttaagctgcagctgaaaatcctctcttttctgcagttctgtctgtggggaagttggctgacgaccctcggctcctatatgtttgttaccctgaagtttgacggtgcttctattggcgcagtttatagctcactgggtatcgcagcggtctttatgcctgcgctgctggggattgtggccgacaaatggttaagtgcgaaatgggtatatgccatttgccacaccattggcgctatcacgctgttcatggcggcacaggtcacgacaccggaagcgatgttccttgtgatattgattaactcgtttgcttatatgccaacgcttgggttaatcaacaccatctcttactatcgcctgcaaaatgccgggatggatatcgttactgacttcccgccaatccgtatctggggcaccatcggctttatcatggcaatgtgggtggtgagcctgtctggcttcgaattaagccacatgcagctgtatattggcgcagcactttccgccattctggttctgtttaccctgactctgccgcatattccggttgctaaacagcaagcgaatcagagctggacaaccctgctgggcctcgatgcattcgcgctgtttaaaaacaagcgtatggcaatcttctttatcttctcaatgctgctgggcgcggaactgcagattaccaacatgttcggtaataccttcctgcacagcttcgacaaagatccgatgtttgccagcagctttattgtgcagcatgcgtcaatcatcatgtcgatttcgcagatctctgaaaccctgttcattctgaccatcccgttcttcttaagccgctacggtattaagaacgtaatgatgatcagtattgtggcgtggatcctgcgttttgcgctgtttgcttacggcgacccgactccgttcggtactgtactgctggtactgtcgatgatcgtttacggttgcgcattcgacttcttcaacatctctggttcggtgtttgtcgaaaaagaagttagcccggcaattcgcgccagtgcacaagggatgttcctgatgatgactaacggcttcggctgtatcctcggcggcatcgtgagcggtaaagttgttgagatgtacacccaaaacggcattaccgactggcagaccgtatggttgattttcgctggttactccgtggttctggccttcgcgttcatggcgatgttcaaatataaacacgttcgtgtcccgacaggcacacagacggttagccactaattacgcaaagaaaaacgggtcgccagaaggtgacccgttttttttattcttacttcaacacataaccgtacaaccgtttcacgccatccgcatcggtttcgctataaacaccttgcagctccggcgaaaatcccggcaacaaattcaccccttcttccagtgcaaggaaataacgttgaaccgccccaccccagacttccccgggtaccacgcaaagcacgccaggtggataaggcaacgccccttctgccgcaattcgcccttcggcatcacgaatccgcaccaactccacgtcaccgcgaatataagcgctatgcgcatcctgggggttcatcaccactgacgggaaactctgctggcggaacatcgctttttgtaggtctttgacgtcgaaactgacatacagatcgtgcatctcctgacacaactggcgcagggtgtagtcgcgatagcgcaccggatacttgttataaacgctcggcaacacctcaaccagcggcgagtcatcctcaatatgctgttcaaattgcgccagcatcgccaccagttgtgccagcttctcgtggctttccgccggagttaataaaaacagaatggagttgagatcgcacttctccggcacaatgccgttctcacgcagatagtgcgccagaatcgtcgccggaacgccaaagtcgctatattcgccggtttcggcatcgatacctggtgtagtgagtaacagcttgcacggatcaacaaaatactgatccgcggcatatccttcaaagccgtgccacttcgcccccggctcaaaactgaaaaaacggcggtcgctggctaacactgatgtcggataatcctgccacaatttgccatcaacaacgggcgggataaacgggcggaacagcttacagcgcgcaagaatagccttgcgcgcttcaatccctatctcaacacactcagcccacagccgacgcccactctccccttcatgaattttggcgttaacatccagtgcagcaaacagcggatagaaagggctggtagaagcatggagcataaaggcgttattcaaccgcttatgcgggcaaaaacgcgcctgtccgcggatatggttatcttttttatggatctgcgacgtctgtgagaatcccgcctgctgtttgtgcaccgactgagtcacaaagatccccggatcgttttcgttaagttctaacagcagcggcgagctatccgccatcatcgggataaattgttcataaccgacccacgcggaatcaaacagaatgtaatcacacagatgcccaacggtatcgatcacctgacgggcgttatagacagtgccgtcataggttcccagctgaataatcgccaggcgatacgggcgcggcaggtcggctttttctggcgcaacgtcgcgaatttgctggcgcagatactcttcattaaaacagtgcgcatcaataccgccaatgaaaccaaacgggttgcgtgaagcttccagatagaccggcgtcgcccccgcctgaatcagcgcgccgtgatgattcgacttatggttgttacggtcgaagagcaccagatcgccacgcgttaacagcgcattcgtcaccactttattcgctgccgatgtgccgttcagcacaaaataggttttatcggcatgaaagactttggctgcgaatttctgcgcatctttcgccgatccttcatgaataagcagatcgcccaattttacgtcagcgttacacatatcggcgcgaaagacgttctcaccaaagaaatcgtaaaaatggcgtccggcaggatgctttttaaaaaacgcaccatgttgatgtccagggcaagcaaaggtgctgttgcccatctcaacgtactgcgtcagcgtgtcataaaacggtggcagcaaattctcttcatactgacaggctgcggattccagctccagccactgctgctcgttgccgttgattaccgccgtaacgcccgcaggtaattcaacagcatgttcggaatacaaaaacaccggtagatgaaaaccggtgcgcttaagcaacgcaagaatgccactgcgactatccgcagcggtaatgacgactgccgcgacgtccgtaaaatcagtatctcccaacgccaccacgcgacgatgagaagaaagtcgggataccagttcactactggcggcaatattcattgatttcataagcgcaaacccgtttcggggaagtaagaataccggacaaggtggaaaaccctgccccatgagatatgggtcaaactggtcaccagctccgaccgccagacatcagtaaaagcagaaacgctctgattttactgttgtcctgcagtgagcgtgcgttaacttcaccgcatgagcagtaacatagaaagggaaacgtttcgcgcgaaacggcgataagcgagagaatgtaaggagatggcgtgcatcgggcaaactccgtacagagaggagaaaattcgcgcaatcatggcacctttgctaaagcgtgcaagccaggactttgcgaacaaacaagccatcgacggcaccaaacggtcataataagaaaatcaaacaatacagctaacaggaactcttgtggtcatcggcccttttatcaacgctagtgcagtcttactgggtggcgttctcggcgcactgctcagccaacgcttaccggaacgtatccgcgtctccatgacatcaatttttggtctggcatcgctggggattggtattttactggtggtgaaatgtgccaaccttccagcgatggttttagctacgctacttggcgctctaattggcgaaatttgtttgctggagaaaggtgtcaatacagcagtcgccaaagcacaaaatctgtttcgtcactcacgtaagaagccagcgcatgaatcttttattcagaattatgtcgcgattattgtcctgttttgcgccagcggcaccgggatcttcggggcgatgaacgaagggatgaccggcgatccgagtattttaatcgccaagtcatttcttgatttctttacggcgatgatcttcgcctgctcgctgggtattgcggtatcggtgattagtatcccattactgatcatccagttaacgctggcgtgggctgccgcgctgattttaccgctgaccacaccgtcgatgatggcagacttcagcgccgtaggcggtttattgctgctggcaaccggattacgcatctgtggcattaaaatgttcccggtggtcaacatgcttccagcactccttctggcaatgccgctttccgccgcctggaccgcctggtttgcctgacaatgcgtgcaatatcggcaaagtgatgatagattgtgcagtctgcagtaaattgaagaaatttgattgacgagacgaggcgaatcaggtttaatgcgccccgttgcccggatagctcagtcggtagagcaggggattgaaaatccccgtgtccttggttcgattccgagtccgggcaccactaattcttaagaacccgcccacaaggcgggtttttgcttttggatctgacaataaccttcacgaaaaaaattagcttataaagtctgggggaattactctcgccacgttaacgagagtaattttattgatattaatctcctgatactttacccccgtccaaactccagccgctgcacattcaccatcccaggcttctcagcagcactgacatcaatttgtgtcacccgcagcgcatatttttcatccagtgcgtttaaccatttcagcaggtcattaaacaccacaggttctatccagacctgaatattctccccacgatcggctatccgcctgatgaccaccgagtgcgcggaagcactgtcactgatgacccgcgatacctgcgcaggcgttgttgtggcagattttcgcgctgcaataatatccggcgcggcgttcttcagtcgggtgttcatcgccaccagctgctgcaatattgtctcctgttgctcaatccgttcgctcaacggctgccagatgaggacgtaatatccgacgctaaacaggaacaccaccgctgccagtaacatgcccttttcacgcggagaacgccccgccaggtgttgtgccagccagtgttcgccacggcttaactggcgttcacgccattgctgaaaatagtgaataaatttatcgcgtaacatgttatttcctccgcaacgttacgccgccggaaaccgcatcaccctctttctgtaacgcgtcctgttgcacaacataatcggttgccagtacactacgcagtttgtcgaaactggcaaagttcgcggcccgtagctggaggtgaagtatctggcgtttttgatcaaaggtaaaaccacgcatttcgatgtcggaaagtgacgctgatttcagggtgctggctatcgctgacaactcggcgagcagccgggtatcgtcggcctgtgggcgatattttttcagcgccatcgtcacctgagagcgtaaattcacaatccgcttctgctccgggaacaacgttaagaactgttcctccgcctgggtgcggctttgcgccacctgttcgctgacgctccataacgtcacgccccgctccactgccagcgcaaccagaatcagcaatatcggcagaatcatcacccgccagcgcgcccactgttttcggtagctgacgcgaggctgccacggccctgtcagcaggttcccttccggttcgccataagtggtaatggcgggcagagctgtaacggtcaggcgttcagcgtctgcgccagcccatgctgatagcttttccggtgcaatgccgactacggttagcgaaagcggtaaatcctgctcattgagctgggcgcggaacatgaccggagccagcgccagcccggcgctccatccccggcattcatcgatgcggcagataacccgttgcgcatcgcaagccataaacccacaaggaatggacatccagtccggcgcgacggtagcgcgggtgatgccgttttcctgcaaccactgcgcaatgttgcgcatatgctgttggtgaatcactgctacggttgccagttgctggtcgatattcaacggggcgaaatgcagttcatcgatatcctggttcagctcttcttccagtaaggcgggcagaatagtcggtagcgcagcgcgatggaaatgtcgtggcgcgcacccttgcgtaaaaccgtaagttgaatggaatccattgaaggtaactgccgcatcagagcaatcattgctcgtggatcagtgaaatcctgctgatttagcgcaatggcgatatcgccttccttgaaaccgctggcatcgaacagagaacgatctgcccccggcttcgctgcataaccgacaatcccctccttacgcacaggcgtaagctggatatagttaaaaattttctgcggatctttcgccagtgcctgacgcacggcagccgggatctcaactggcacactgacagcaggctcagcaacagcttgctttgcttcgtcactgacggcttttttgttggtcacagcaacagtggaacgttcctcttctgccagactcagacgctctatttttccctgataacgcagcatcacatggtcgcggttgatttcctcaatcaccgcgttgtgagagccaagcgtttcaccctgcaaatagacctgctgtttaccgccttcttcaataaccgcgccgggtctggcaccaaaggcgatcccacgcagcaccacattaagacgcgtttctgccacaggcacaggttcgggttgttttacctgcgcggcgacaggctgatatttgccaaaccagttttgctggctgattaattgcacgtcatttttatcgaacgtttttgcatccacacggctcggtttattcaccggttgagaaaccgccgtatattccgcagaaaaggagatatagcgccagagtgaatgcgccatttttgcagaaataataagcagcatcagccagaacatcccgcgtgcaatttttcgcagatgctctttgtctgtattaagagattgtctctggttaagagtgtgacgaatttttgtcagccattgaatgagataaattcgtgcgtcacgaaaaacaacccgcgccaatttatatctacccgacgttatgctttgactattccacaggtggtacgatccagtttccgctgatactggttacctgtacgtgtatcattaatcgttatgctgtaattaattccctcagtgatcattaatttcaccgtcgggtcagcgcacatttgtcgttgatagctggttaaaaaggcgtcaggcgtctgcgtggtttgtgtacccgcttcgctgataatggtcatttttaccgttgtgccgctactttgcgccagcactaaggtatatcccgcagatttaatcggcaggttttggctgatattttgcgcctgttttttcgccagtaaactggcattttcattatggctggcacagccacttaataatcctgtaacgctcaacaatagcgatattaataccctccctggcatttgttttatcgacatggtaaataatctctaaggttattaataagagttaaaatgtcactttgataatgacgtggttatcattaaaacaatgcctgtagataaagtgttgctataccgcccagacttaaacacggtccaaaaggcagtgtggttgatcctctttttgtaataacggcatatatcaggccgcagcatgaggcgattaaagcaacattgggcagcgacaatgcccccacccagccacctaacgcggcgaaaagtaatacatcgcccatgcctaatgcttctttacgcagaactattccggctatccaacgcagagagtaaaaagtgataaatcccaccaggacgccggtgactgcatcttgtagcgtgagcggactctgctgcgcccatgccgcaatcagtcctgtccacaatacgccctgagtaaaaacatcgggcagccattggtgatcgaggtcgatgacactcgcggcaatcagccaggcggataatatcatcaccgccagcccccatccactttctggccagaccagactcgccagcaaaaaagcaagtgctgtcaataactccaccagcggataacgcttgctgattttcgcctgacagtcgcggcagcgccctttgagcatcagccaggagaacagcggaatattgtcacgtatccggatggtctgctgacaatgtgggcagtgcgaacgcggtagcgcaaggcttatttttgactgcgcactcgacatttcaccgtgaaactccgccatttgttggcgcagcatgattgggtaacgccaaatcaccacattcaaaaaactgccgatgatcaatcctccgacggttgccaggacgggcatcgccgtggggtattgctgaaaaacatcaaaaagcatggttaaaggttgtttgttgtaacttgctggatgcggcgtaaaacgccttatccgtcctacgggtgtctgccagcgcaaataatcgcggctttccccgtctgtaggcccgataagcaggcgcatcgggcaaatgtgttaacccggtgcgccttatttcatgccggatgcggcgcgagcgccttatccggcctacgggcttactcggcagacatcttatgctcggtaacctgattaatggtttccggtccctgttccggtttcggcagatcgagtgacgcgagcgtgttgtaagccgactggctcacaccgccctcgaagctcatctcgctcgcccccggcagctggtaagcattcgcgcccggattccatttcttaaagaactccgaaagatccgtctgggcgacccaggaggcacacagcatcagcgtgtccgctgcgttaccgttggattcagcacagtaattcttgccgccaaacttgtcattgctgacctcatcgccgcgtgctttacgatgcatcaactggaacaggttccagcctttcatcccttcacgctcgctgtaaaactctggcagaggagtgccatctggataccatttcttgatatcaaagtttttctctgcccattccttcagctgtgcgtacatcagcagacggtcacccgcaccgccgcgtgcccatgcctggttgttgctctcctccagatattccggtgcgacggtaatatcgtcagcgacacggttcatcttgccgagataacgatcctgcatgtacagcgccagcacgttgttagcgacttcagttgcacccggtacagtcaacggcgtttctgcggcgttatgaccgacttcatgccagatcagccagtcgttcagcggcgtcgtcggcagcgtggtgctgttcggcgagaagctgctgttcattaccggataacccgaatgcgcatcaccgatggagatctgcacatcgttggtgaaacgatgtttgtggcccggcaagtttttataggtaaacatccggtgcttaccgtcttcgctatcacggccgtagaagtcattcatcgagctggcaaaggtatccagatcgttagcgaattgctccagtccgccagtgtaattgctggcattcaggttcttcttcggtgtggtatagacgaaagcgtctgattccagctcacccagcggagccggtgagttcagatcgtttttccatgcgccgtctttatagaacggtgcttttaccacgccagtaaaggtgaagctggcagattcattggtagagctattgcccttgatataaatcaggccaccgtaaggcaccttgaacttcaccgtaccgctagcgtccagagagtacgttttagtcactcttggcggacggttcagcgcaacttcatgcttctcacgtccggtcaggtcgtcagccagcgccacggtgacggtcacaggaacgttcgcattggacttaatggtgacctctttctgagccggtgcccacaggccagttgactgcatgttacctgcaaaccatttggtcggattcgagtacaggctgatggtttcagtaacgttctgtccctcttccgatactgctcccggatacttctcgacatcaactttgatgttcagatcccaccaggaacggcccagcatcaggcgtgtcagcggtttttccatatagttgagcgggtagctcgggttcatcatgcccgctttgctgctaccgtcaccgtagatcatgttgttatcgaccagcgattttttcagatctgcagaacacttggtgccgcctgcataggcatcattggcgtagcagttcaggaactcggtgaacgttttaaagcccagctcgtcatttttgccttcttcataacgatagctcgtatcgttccacagccagaccgacatgttctggtacagacgttccagatcgacgctgctcagacgctcacctttgcgaccattggtccggaagtagagctcatgctgatacagacgctgaatgttggtgcctaaatccgcagcctgcaccatcgcttttgcagtgtcggcgttaaggcttagttgcgtatactgtggaacatacatgccaccagtaaccggaacccccgtgccaggacgatattccaggcagttgacctcatagtgatatgccggattagtacactctttcagccccgggaacgcggcgaaaattttctccttcgcagccttcagagaatcctctgttttatgatcggcctcatcaataaaggcataacgcgtttcctgtttgccatctacatcttccagccagctggcaacttccagcttcggtttgtcatcaggtttgttttctacctgatatttccacttaacttcccctgtcttactatcgatggtgtacggcagcgcaccatctacggcaggataacgttcatagacccaaatgcccgttgcgcgctgctgacgaacgcggttcggatacccttgcggatcgttatttactaccgacttgttcagtgccatcgacagacctgcggcatccaacagacgcacaaaaccagacgcgctctcttccttaagattgctcatcacgttttccatgatcagcaccgatccacctttgttcagataggcgatcagatcggtcacatcctgctgagtcagcttcggtttgctggtatctgcacgcagcgggattgcataaggatcgttacccacctgagtcacatattcaaagccgttaaggatcagcagcggcatttctgcggatcgagatcgccatagctacttaaatgctcaacagagatgcccgcaaaatccggatggaagtcgaacgcagcgctgtttcctgtaacctgaccatgacgtttaaaatagacagtatccaggttggtgcctacggtcatgctggctttcgcgtccggcttccatttatcgtcggacagatagcgcagcacgttctccatgaagttcttcatgtcatccgggtcgctgttgagcgtacactgcccatctttattaacgcccccgttccagctgtaaccgttcgggcaacgcaaaatgctgttgtagtgtgggttaccgataaccatcagtttgccctcaccgacttgccccagcgaaataaacggcaggttaaaggtggcggtatcgcgcgtaacgttttccggctcaacaagagaaggcgcttccgtaatgtacgccagctcgtttttatcccaggcgcgtttttcgccgaaggccagccagtagtttttatcattacgcgccatcagaatcgggaaggccgcgttggagatattcaccaccgcctgaccgcgcgcattacccgtgctgccatagaagttggtggagtcatggaatacatggaacttgctgacagatttgtagttcgtatccacgccccacagcttgttgataacgccctgaatctggccgtcattaacattgcgcgtcgtcagcgagaaccagcgagcctcgttacaaccatcggttttcgcacaaatcgcggtatcgatctctttggcctgacccgtattaaactgctcaataaattcgttaggcagattaacgacttgctcaccttcccccagcgtcgcaccgttggataacgagagattgataatctcgttgatcacgttgggatattcggcaaagaccttgcgtacatcgtccggaacaacacgggtattattttgcccggtcgtcgaatagcgatgaataagctgatcaatattcgccccgcgaacttcatcacccagttcagtcagcgcaatggtcgacttattgccgcgcactgaacccagttcaaaggtatcgataccaaaggagatggtttcgccccagctaaaggaaaattcaccattttcccctgtcacgccacggcctgaattggtgtagtagttgacgccagcaacaccatatccctggctatcgaccagtcgaccttcagagagaatgatttcagtgggttgatactgataaaactgttccgcgttagccgacacgaaggaagcgttcagatccggttttgttcccggcgtggtgacgggcacgaccggtgaagtatgagtggatggcgctttatcggtcgcagcattgttttccacctcttcattgaccagctttttgaactcttccggtgccagatcgatttgcttatacagcgagtcgaagcgtttactctcgatcaccgaggagaacgtcagacaaacctgttctgtattcgccggacagctgttactggacgttaccagcgaaaccgcattgcttttcttgtcatcggagcccgccagttcttgcgcgtcctcaaggctaaacgacactttttcaaccgcacgcaagctacgcgcagcttctgactgagtgttgaaggtggcaattgtcgtgttacccgccacgcaagtaacgtcctcgccaggtttaaatgtaaagccatcgctggattcaccattacaggtagcaccagttacccgctggcttccgcccagggtcagataacccgttttcgtaggaacaggttctggctccggttctggtgttggttcaggatcaggtatcggttctggcgtaggctctgggtccggcgttggctcaggcgtcggctccgggtttggtgttggatcaggtttcacttccggcaaagaccctgttccagaatctacaggcggcgtatcggaggaagatccggaaccaccgccatcacaaccggctaacagggttgcgctcaaaatagccgctaaaagcgatttcttatatttaaatttcttattcattaataacgcaagtgacaaaacaatgttaaaaaattcgtaactgggagaaatagttttatgctttatcttctctaataacttcctccattcttaagaaaacgacatcattgatagaaaacaggtgaaatttataagaataacccctatacgatgtctatctggctatttttacgaaatttcaacaaacaaaaaattaacaacatttcacaacgtaactatataaatttgttggtagttttaacgattaagattgcaaaagcaacagatagaacggtgtttgctcatcaagcgaacataattaatacagacttgttttgcgtgataaaaaaatagatgttctcacgctcttaattatttagcaggttatctgaacgcaaaacattattgctgcatggataataaagcgagaaatgattttcaattaataagacagaataatgtaaatgaagccggatgatattaacgatcatccggctttattgatttacgagactaacatcccggtaaacacatacgcctgcagcagggtgataatgccgataacgctggcaaaaatcagactgtgcttcacggtgtagcggaacagttcagattctcggcccaccatgcccgtcgcggcgcaggccacggcgatagattgcggggagatcatcttgccagttacgccgccgctggtgtttgctgccaccagcagggtgtcagagacgttgatttgctgcgccgtggtcgattgcagtgaaccaaacagggcgttagaggaggtgtccgagccggtaaggaatacgcccagccagccgagaaacggtgagaagaacgggaacatcacgcctgtacctgccagtaccagcgccagcgtggtggacatgccagaatagttggtgacgaaggcgaacgccagcaccatgccaatcgacagtatcggccacttcaagctaattagcgtttcggcaaagacgccaatacctttcttgatccccacaccgaggatgaagatagagataatcgccgcaataaaaatagcggtgccgccagccgagagggggtcgaatttaaacaccgcatccattggcgttggttgggcgacaatgggtgccgctttcaacacttgttgatgcaaatgagggatctggaaattaatcaccagtgaataaaacgcgccgcccggagcaaataacgctttaaacggcttcatggtccagatggtgaccagcaccgttaagattaaaaacggtgaccacgctcgaatgatttgccccagactatattctgaaggcacgggaccgccagaagatggcttatttaccaccatcgcacctgcggattgtcccatgctgattgccgtttcggtatttttcggccgccagactttaaggaataaagcgagtgagacgatactcaccagcgccgaagtaatatccggcagttccggaccaatatagttagaggtaaagaactgagtgacagcgaagcttcccccagcaaccagcgccgctggccacgtctctttcacccctttccagccgtccatcattgctaccagccagaacggcacaagaaccgacaggaacggtaactgacgtcccgccattgcgccaatgtggaacggatcgattcccgttacctgaccggcgaccagaatcggcacgcccaacgcaccaaacgccaccggcgcagtattggcaatcagacacagccccgccgcgtataacggtttgaagcccaggcccaccagcagcgcaccggtaatcgccaccggcgcaccaaagccagccgctccttccagcaacgcaccaaaggagaaaccaatcagtaacacctgcaaacgctgatcgtcggtgatggagataaccgagctgcggataatatcgaactgcccgctggcaacggttaatttatacaggaacaccgccgcgacaataatccacgctattggccataatccataaataaagccatagcccgcagcagcaaatgccatatcaatcggcattttaaaggcgaatattgcaatcaggatagataatataagggttattgctccagcgacatgtcctttcagacgtaataccgcgagtgcaacgaagaagaatattatcgggatcagggcgaccagagcggatagccccagtcctcccatcggcatatacatttgggtccaggtaaccatattgttcagtctcttattatctttatatgcttgatatacttaaggttgtaataagcaaaagaggactgaactgtaaaatataggcgttatactttacagcaacagtacgccgctaacgcaattgctacctctggcataacaagtatatcgggtaagggtttctgttccgcacacgcagacgcagagtatcgttaagatgtccatattgttgttttaggcccgctagtaatgcgctacgggtatttaatattgttaaaccctgataatcgctccggttatttccgggataaatgtactaccgcagttactatcatagccccgacaataaaacttgccggggcttttttgacgctattaatgactttctttttcgcgtaaacgccaggcgtgtaataacggttcggtatagccgtttggctgtttcacgccgaggaagattaaatcgctggcagctttaaaagcacacgagttagcgaaattccccgccatcggacgataagccggatcgccagcgttttgctgatcaaccactttcgccatattctccagcgacgcctgcacctgttctttggtcagaataccgtgacgtaaccagttggcgatatgctggctggagatacgcagcgttgcgcggtcttccatcaacgccacattgtgaatatccggcacttttgaacaaccaatcccctgctccacccagcgcaccacgtaccccagaatcccctgcacgttgttatccagctcttgttggatctcttgcgccgaccagttagcgttttcagcaaccggaatagtcagcagatcgtccagcagcggttcaaattcagcattgaactcggtctgggcaatgttggcttgtacgctctgtacgttggtttggtggtagtgcagcgcatggagcgtagcagcggttggtgacggaacccaggctgtgtttgccccggcacgcagttggtcgcccttctggctgtacatgtctgccatcaggtccggcattgcccacatgcctttaccaatttgcgctttaccgcgcagcccacagaacagaccggaaagcacgttattacgctcgtaggctttgatccaaggcgtcgatttcatctgatttttacgcagcatcgggccagcttccatcaccgaatgcatttcatcgccggtacggtcgaggaaaccggtattgatgaacgccacgcggttgcgcgcctgagcgatacagctacgcaagttcagcgaggtccgacgttcttcatccataatgcccattttcagggtattcggtgccataccgagcattgtctcaatgcgggtaaacagtttgttggcgaacgccacttcctgcggaccgtgcattttcggtttcacaatatagacgctgccagtgcgcgagtttttctgcacttttaaatcatagagggcaatcgcgccagtcatgacgccatcaagaatgccttccgggatttcattgccttcgctgtcccaaatcacaggaatggtcatcaaatgacccacgttgcggataaacagcagcgagcgtccgtgcagagaaatttcagagccatcggcggcggtgtaatgacgatcgtcattcagtttacgcacgatttgccgaccgtttttctccattttctcttgcagagtcccctgcatcaggcccagcaggttgcggtacagcaggattttatcttccgcatcaaccgccgcgaccgaatcttcgcagtcgagaatggtactgatagcagcttcgacgataacatcgttgatgtgcgccggatcgtctttgccaatccgcccattggcatcgatttgcagctcaatatgcaggccgttatttttcagcaaaatgcaggtcggcgcagcggcatcgccacggtaaccgacaaactgtgctggagtacgtaacgtggtttctttaccatttttcaactggatgcgtaattgtttatcaaccaccttaaacgccaccacatcctgatagctgccgttttccagcggtagagattcatcgaggaaacgccgaacccaggcgataacctgctcaccgcgttgcggatcgtagccgctgaccatcgccccttcctgcgggatgatgtcgctgccgtataacgcatcgtacagtgagccccagcgagcgttcgccgcgttcagcgcgtagcgggcgttcattgccggaaccaccagctgcggccccgcctggctggtgatttcgctgtcaatgcccgtggtttccaccgtcacgcgctccggttgcggcaccaggtagcccagttcacgcaggaaagatttataggccgctttatcttttaccggccccggattgctgcgatgccactcatcaagcgctgcctgaatgcgatcgcgttctgccagcaactgacgattttctggtgccagatcatgaacgatctcatcaaaattgcgccagaacgccgcagcgtccagccctgttcccggtaaaacttcttcatccacaaaacgtttaaaattggcgtcaatgcgtaaacggctctgggttatggtttgactcattgtttatctcctcgttttcgcttatttcgccaacaccgctgctgccgctttcgcgacctgcgcatcctgtgctccggttaaaccagaaacgcccacggcaccaataatttgcccatccacaacaaccggtacgccgccttccagcgacgttaataacggcgcagtcacgaacgcggtacgtccgttgttcaccatctcttcatagcccttagtttcacgacgccccagcgcggcggtacgcgctttctcctgggagatataagccgcaatcggcgcgcaatcgtccatgcgacttaacgccagcagatgaccgccgtcatcggcaacagcaatggaaacagaccagttatttttctgcgcctcttcctgacctgcggcaataattgcactcgccatttgctggctaagaatgactttagttttcattttgttattccttttcaagggcttgttctacaatttcaatccagtgacgcacagaggtacgaccggcgctcgccagatgcgtctggcaaccaatgttggcggtgacgatcatttccggtttgccgctttccagcgcattcattttgttatcccgcagctggcgtgccagatcgggatgcgttaacgcatatgttcccgctgaaccgcagcacagatggctgtcgggaacgtccgttaaggtaaatccaagacgaagcaacactttttccacttcgccgttcagcttttgcgcatgttgtagggtacacggacagtggaaggccagctttttatcgccgcgaattgccagtttttccagcggttcctcgcgcagaagttcgactaaatcgaccgccagttcactgacctgacgtgctttatcggcatataacgcatcgtttttcagcatctgcccatactctttgacaaacgcgccgcagccgctggcggtttgcaaaattgcctcggcacctgcttcaatcgcgggccaccaggcatcaatattattgcgcgcccgtgccagccctttctcctgcgcattaagatgatagtccaccgcgccacaacagcctgcttcgttagctggcatgacgctgatccccagacgatccagcactcgcgcagttgccgcgttggtgttgggcgaaagcgtaggctgggcgcagccttccaacattaaaacccgacgcttatggcgcagcggcggacgcggtttagctttcaccgtttcagcaggcagttttgctctgacctgttccggtaaaaacggtcgcagcaccagccctacctgcgtcagcgcacggaagaccgccggacgcggcactacctggcgcaatccttcgcgcagtattcgctccggcagtgggcgtttcactttctgctcgacaatatcacgcccgatatccagcaaattgtgatagcgcacaccagaaggacaggtggtttcacaattacggcaagtgaggcagcgatcgagatgctcctgtgttttaagcgtgacttcgttgccttccagcacctgtttaatcagatagatgcgcccgcgcggcccgtccagttcatcgcccagaagctgataggttgggcaggttgcggtacaaaatccgcagtgaacacaggcgcgcaggatgctgtcggcttccagcgcgcgcgcgttctgccgcatctcttcagttaattgggtttgcatagcctgctcctcaaagttccgcgtacatgcgaccggggttaaacacgccgcaagggtcgagctgctgtttaagctgctggtgatagcggaataaaggagccgatagcgggcaaagccaccatctccggcactaaagcgggtcgcatgaccgccagcgttgcgggcgatgcgatggatttgattgtcctcggctgtcgatttcagccagcgtaacgccccgccccagtcgatcagttgctcgccgggtaaatccatcatcggcgcatcactgggtaatgaaatgcgccataaggtacctggtaacgagaagaacggcagttgttgttcacgcaattgctgccagaactgaccggcaacctcttcgccacccagcagttcacgcgctgcttttaccgatccttcgccgccctcaaggcggatccacaacgcattgtcgaagtaacataagccactaatgggtaatggctggagttgccactcggcgatttcactcatggcttcttgcaggctgatttcccgacgcaggctcagggaggcgcgcggtcgcggtaacactttcattgagatttcagtgagcacgccaagacaaccgtagcttccgaccattaaccgtgagagatcgtatccggcaacgtttttcatcacttcgccaccaaaacgcagatgttttccagcgccggtaatgatgcgcgtgccgaggacaaaatcgcggaccgaaccgctccacgggcgacgcggccccgccagcccgcaggcgaccatcccgccccaggtggcttcttcaccataatgcggcggctcacaggggagcatttgccccgcgctttccagcgccgcttcaattgtcaccagcggcgttccgacacgcgcggttatcaccagctcggtcgggtcgtaattaacaatgccgcgatgacaacgaacatccagcgtttgcccggtgacagggcgacctaaaaaggctttgctattgctgccctgaatcaccagcggcgttttatcgctaatcgcctgattcacctgctccagcagcgcctggctgtaatcacactcgcgtagcatcagaaacgctccagttcagggaaaggtaaatgaccgtgatgcacatgcatggcaccaaattcagcacagcggtgtagcgtgggaatgtttttcccagggttcagcaaaccatcggggtcaaacgccgccttgaccgcatggaaggtcgtgatttcatcgctgttgaactgggcgcacatttgattgattttttctcgcccgatgccatgttcgccactgatgctgccgccaacttcaacgcagagttcgaggatcttcccgcccagctcttccgcgcgggcaaattcaccgggttcgttggcatcgaaaaggattaacgggtgcatgttgccatctccggcatgaaagacgttggcaacacgtaaatcatattgctgcgataaacgggcaatgccttccagtacgccaggcagggcgcgacgcgggatggtgccatccatgcagtagtaatccggggagatacgtcctaccgccgggaacgcatttttgcgaccggcccagaaacgtacgcgctctgcttcgtcctgtgccagacggacgtcagtcgcgcccgctttcaacaagatgtcgttaacccgctcgcagtcttcctgtacgtcagactccacgccgtccagctcgcataacaaaatcgcttcggcgtcgacgggataaccggcatgaataaaatcttccgccgcgcggatcgacaggttatccatcatctccagcccgccggggataatgccattggcgatgatgtcaccaaccgcaagtccggctttttctaccgagtcaaagctggctaacagaacccgcgccacgggcggcttcggcagcagttttaccgtcacttcggtggtcacgccgagcataccttccgatccggtgaacagcgccagcaggtcaaaaccaggtgaatccagcgcgtccgatccaagcgtcagtgcctcgccgtccagcgtttgcacttcaattttcagcaggttatgtacggtcagaccatatttcaggcagtggacgccgccggcattttcagccacattgccgccaatggaacaggcgatttgtgaggaagggtccggtgcgtagtagagattatgcggtgcaacggcctgggagatcgccaggttacgcacgcctggctgcacgcgcgcgcggcgaccaacggggttaatgtcgaggatctctttaaagcgcgccatcaccaacaacacacctttttccagcggcagcgcgccaccagaaagcccggtgcctgcaccacgggtcaccaccggtacacgcaggcgatggcagacagccagaatcgctgtcacctgttccatttgcttaggcagaacaaccagtaatggacgcgtgcgatacgcgctcaacccgtcacactcgtaaggaatgatctcctcatcggtatgcaggatctcaagtccagggacatgctcacgcagtgccatcagtaccgatgtgcggtcgacatcgggtaaagcgccatcaagacgctcttcgtacaagatgctcatgagtaggcttcgctttgttgtgttgtgtggcagctgatttttgcgcgctgcttctgtgaacagttattaagcgggcttttcgttttcgtctatctctttagctaccggtcagaccattttttttccagctctgtgaccttgtcttggttaactcaatgttaaattgatgtaacataatcacttacgtgatgtgcgtgttttgcgagttaagaacagaaaaattggtcctacctgtgcacgaggtccgggaatgaaagatgaacgtcgccctatttgcgaagtggttgcagagagtatcgaacggttaattatcgacggcgtactgaaggtcggtcagccgcttccctcggaacgtcgactgtgtgaaaagctcggcttctcacgctccgcactgcgtgaagggctgaccgtgctgcgcgggcgcgggattattgaaacggcgcagggtcgcgattctcgtgtcgcacggcttaatcgggtgcaggacaccagcccgctgatccatctgttcagtacgcagccgcgaacgctgtacgatctgctcgacgttcgcgcattactggagggcgaatcggcaaggctggcggcaacgctgggaacgcaggctgattttgttgtgataacccgctgttatgaaaaaatgctcgccgccagtgagaacaacaaagagatttcgctgatcgaacatgcgcagttggatcacgctttccatctcgccatttgtcaggcttctcacaatcaggtgctggtgtttacgctgcaatcattgaccgatctgatgtttaattcagtgtttgccagcgtaaataatctctaccatcgaccacagcaaaaaaagcagatcgatcgccagcatgcgcggatctacaacgcggtgttgcagcggctgccgcacgtcgcccagcgcgcagcacgcgatcatgtgcggaccgtgaaaaagaatctccacgatatcgagctggaaggccaccatttgattcgctcggcggtgccgctggagatgaacctgagttagctggtattaaatctgcttttcatacaatcggtaacgcttgtacggctccgccccaatgcgttccagcatgttattcatgcctgtattggtttcgaggatccatgacatctccagcgcatcgatcttccggcgggcaaacggatcgcgtaaggcttcaatcaataacagcgcaatcaccgggccgatgcggctgaactgatactcgtcgcgcacgcccatcagcggtactcgcgcagttcgcacaccgctgactttcaaacgccacagcaattttgcccagccgaagggaaagagcgatccgttcagatcggcaatcgcctcgttgatgttcggcaagccgacaataaacgcgcagggtgcagaatcaatctcagcgatatagatcatatcgtccggcaccagatatttaagttgatcgcccatggtcgcgaattcatgttcggtaaacggcacaaatccccagttgtgctgccagccagagttgaaaatctcacgcaggatctgcatctcttcggcaaaccgctgacgattgatgcagcgaatggtcacctttttgcgcacctgatccatcagtttttttagcgccggagagaaagtgagatcggttcgctgcatccaccacgccagtaaatcaatgcctttgtgataacccagttgttcaatatgcgcggcataccacggtttgccgtgtggcatcatcgcacagggtggtgtgtcaaaaccttcaatcagtaatccgctttcctgattgatattcaggctgaaaggaccgctgatcttacttgcaccttgtgacttcaaccacgcttccgctgcgccaaacaacgcggcaaaaacctgcggatcatcaatggcgtcaatcatgccgaaatgaccggtatctttgccgtaacgctcgcggtgcaaggtatctatttgcgcggtaatacgcccaactatctgccccgctttttttgccacccacgcctgccagatgatatggtccgtccccggatttttcgcagacaaatgctcgttgcgttcaatgaataaagggggtatccagtttggatcgtcgggataaagtgatgacggaaaagcgataaatgccttaaggtcatttttattaaggaaggtgcgaacaagtccctgatatgagatcatgtttgtcatctggagccatagaacagggttcatcatgagtcatcaacttaccttcgccgacagtgaattcagcagtaagcgccgtcagaccagaaaagagattttcttgtcccgcatggagcagattctgccatggcaaaacatggtggaagtcatcgagccgttttaccccaaggctggtaatggccggcgaccttatccgctggaaaccatgctacgcattcactgcatgcagcattggtacaacctgagcgatggcgcgatggaagatgctctgtacgaaatcgcctccatgcgtctgtttgcccggttatccctggatagcgccttgccggaccgcaccaccatcatgaatttccgccacctgctggagcagcatcaactggcccgccaattgttcaagaccatcaatcgctggctggccgaagcaggcgtcatgatgactcaaggcaccttggtcgatgccaccatcattgaggcacccagctcgaccaagaacaaagagcagcaacgcgatccggagatgcatcagaccaagaaaggcaatcagtggcactttggcatgaaggcccacattggtgtcgatgccaagagtggcctgacccacagcctggtcaccaccgcggccaacgagcatgacctcaatcagctgggtaatctgctgcatggagaggagcaatttgtctcagccgatgccggctaccaaggggcgccacagcgcgaggagctggccgaggtggatgtggactggctgatcgccgagcgccccggcaaggtaagaaccttgaaacagcatccacgcaagaacaaaacggccatcaacatcgaatacatgaaagccagcatccgggccagggtggagcacccatttcgcatcatcaagcgacagttcggcttcgtgaaagccagatacaaggggttgctgaaaaacgataaccaactggcgatgttattcacgctggccaacctgtttcgggcggaccaaatgatacgtcagtgggagagatctcactaaaaactggggataacgccttaaatggcgaagaaacggtctaaataggctgattcaaggcatttacgggagaaaaaatcggctcaaacatgaagaaatgaaatgactgagtcagccgagaagaatttccccgcttattcgcaccttccctaaatcaggtcatacgcttcgagatacttaacgccaaacaccagcgaaatgagcggcttgccgacgatcaacaccgcgagcgccaccagaataccgattccgcccgccagtaaaccggacttcacacctaacaaccacggtctggtggtgcgcggatctaaacgcatcacctctgggtaaaaacttttacccagcaaacccgctggcgttccggcggcgtcgaagaatgtcatggcgattttaaataacccggcggcagcgggtcctaacacgatccccaccaacactgtgctgcacgagttacgcgccgaccagatggagtgggcaatgttggttgaccagacaaaactccacgcgcctttaatgtatcgggcagactcaaacagattcaatttgaaggcgttatggatatttcggcggcgtaattcgcgcgcggcaaaccaccagtacatggtgccgccaaccagattcgacacgtaccaggcaataacaaaacccgcaaaaccaaagtcaaaataccaggctacgacgctccccgctgcgcgcagaaaaggtttcgtcgcctgctgtacagcaattaaatcgaagcgatctaccgcacgcagaatgccggtcggcgtggaggaagccattgaaggaatgagcgtgcaatagagcgctgccagccaaaaactttggtcatccagacctaatgaatgggaaaggaatggcagtaaggcaatgccaccgacaatcgccaccgcgccgctgacgatatccagcgagaaggaaaatgagacgacattgcggaattgctgcggattattgttggttaatgctggtgttccgtactgaaccaccagttgccatgtctgaaacttaataaaatcgctgatcgacttggcgtacgattgcacaatcaccagtacgccaaacatggcgggcgtcatccctttaccggcacacgagagcgccaacagacccagcaaggcgctcacaacattactggagcctaaccaggcgctattgcgaataatggtgcgaaacgcgccatctgcaaaccaatgtttgatgttaaaacccgccaattcagcctgaccttatcgttgatagtaaaaagtatcccgccagccttaagttaaacttcggcggtcagaaacgatggcaaccagagaaaccgccttctgtgcctgttccagcacttcgctgtagggcgctctggaatcaatctcaagaatttttgtgccgttatagccaatcttcgacatgacaccgattttgtcctgcagctcggcatagtcatggtcaggcttgcgggagatggcagtctcaatatcaatgcccaggcgaataattaattccgggcgatattgcgccatttgttggtataaacgccgttcgcgctgcgccagaaacatgctgattttcccggtcgcacgttcgacgccaatccccggtccatcataataaaagcccgaaatttcagcctgcgggaagcgatcgctgaccaccagaacgccactttgcgccagtcgctgaaccttgcgtagattcgccattcttcgcagcgagaagcagtacataatcaccgccgcccatagcgccggagatttggttttcatgctttgggttttcgaggatttggccgccagtcgccgttccagccagacgccaaccaacggcaatcgtttgattttgtcgccgtcttcgccggagagcagccccagatagcgccgctcggtttgccagtgttgttgcagcgatttcaccaggtcggtggtcagtgtggatttaccggtgccatcacacccgaccaccgcaatcagccccggaatgtagttgggctgcggcgcggttgtactattaacagtttgagtttgtagtgcatccattcgttaaatcatcccctatccattttggtgatcaggaaagcgcggcgtgaattgcgcgtagtgacgcttgcagaatttcatcggcggggtgtcgcccatccagttcaaggatctttgcgccattgaatgtcagttgcggcgtaacggcgattttttcctgtaacgctgccagttggtggtcaggtttacgcgcaaacgcggtttgttcatcaatgccaagacgaatcaacaatacgggcaaataagatgccatccattggtacagcttcagctcgcgctgccttaacatttttatccaaccgttaccgcccgtggtttttgccaattgcgggccatcaaagcgaaaccccggcacttcaacctgcgggtagcggtcggtgatgagcagaaagccttgctggcttttacacaacattttgcgaaacttgtacgcccgccagcaggaaagcagatagataaccagtgcagtaatattgccaggcggtgttgagggcttttcgtgcacatgtgccgctttacttcgcagataacgcccaaaaggtgcgccaataacagggagctgtgaaatccattcgccaattcgcccggacgattgcccgagataaatgtgttctgttggcattcttgctgccagttcatttaccaggcttgccgtgagggtcgatttacctgaaccatcacatcctacaatggcaataacacgcactggcgtggaattaattattgacatattacgttgattcacgaaaaacccggcagtaaataatgtattgaatattacgtggtccgtgctcagaatatccgttcaaccttattgtgacaatggttaattgtgacattgacctgaattacgctttcataaaaacatattaaccaaataaatatttttaatggatatttaaattaaaggatatattcatgcagtcaataacacctccattaattgccgttattggtagcgatggttcaggcaagtcaacggtgtgtgaacatcttattaccgttgtcgaaaaatatggtgctgccgaaagagttcatttaggaaaacaggccggaaatgtcggtcgtgcagtgacaaaattaccgttgatgggaaaatccttacataaaacaattgaacgaaatcaggtgaaaacagcaaaaaaattgcctggaccagttccggcgctggtaattacagcgtttgtcgcccgtcgcttactgcgctttcgtcatatgcttgcctgtcgtcgtcgcgggttaattgttctaaccgaccgttatcctcaggaccaaattcctggcgcttacgatggtacggtgttcccacctaacgttgaaggtggtcgttttgtctcatggctggcaagccaggaacgtaaagcgtttcactggatggcgagccataagcctgatctggtcatcaaactcaatgttgaccttgaagttgcctgtgcacgtaaacccgaccataaacgggaatcgctggcgaggaagattgccataacgccacagttaacctttggtggtgcacaactggttgatatcgatgccaatcagccactggaacaggtgttggttgatgcagaaaaagcgattacggattttatgaccgcgcgtggttatcactagtcaaaaatggaaatgcccgatcgccaggaccgggcattttcaggaaggttaaatcaactgcaatgctatccagtacagcccaccagaaagaaaaattgccgccggtaaagtaaatacccacgccatcaggatgctggttaccgttttacgctgtaacccaccgccgtccaccaccatcgtccctgcaactgcagacgagaggacgtgtgttgtggagacgggcatcccaatataactggcaagaccgatagacactgccgccgtcatttgtgccgccatgccttgcgcatacgtcatgccgcgcttaccaatcttctcaccgatggtcatcgctacacgacgccagccaatcatggtgccaatgccgagcgccagtgctaccgccatgatgatccacaccggagcgtactcaatggtgcttaacatatcgctgcgaagttttttcagcaggttctggtcttctttactgacgcctggcagtttcgctagcttcgcggaggtatcagagatgcacagcataatgcggcgcagctggctgcgctgactcacgcttaacggctcgtaactttccatattgcctggcagcatcgttttaacgcgcgcaatagcatcaaaggtatttgccggatgacagtgaaactctgttacttgcgtgccatcagtcgatgctgcaggcaatggaggttccatcgcaatcaacttctgcggcagttcaggatgctgttgcaggtagtgttcgaagttggtaacggcatcgcgggtacgggtaatttcatagccggacgcattcatattgacgacgaagccagcaggggcaatccccaccagtaccagcattaccaggccgatccctttttgtccgtcgttcgcgccgtgcgaaaacgccacgcccgcagcggaaacaatcagcgcaatacgcgtccagaatggcggtttacgtttgccttttttctttttgcgatcttccggaatgcggtgaatacggtcacgctttttcgtcccgctccagtagcgtcgcagcaggaatatcaggcctcccgcaatgaccaggccgacgataggggaaacaatcagcgaggagaaaattttggtcacttcacgcaggtttaacgcatccatcaccgatgagccggttaacagcgcgttggttaaaccgatgccgataatcgcaccaatcaaggtgtgcgaactggaggccggtaaaccgaagaaccacgttcccaggttccagataatcgccgccagcagcatggaaaagaccatcgccaggccgtgggttgaccccatattcagcaacaaatcggttggcaacatatggacaatggcataggcaacgctaagtccgcccaataacacgccaaaaaagttaaaaaatgccgccatcaccacagcaagttgtggttgcatggcacgagtataaataacggctgccaccgcattcgccgtgtcatgaaaaccattgattgcttcgtagaacaacacaaatgccagagcaagcaataacaaaagccctgtgtatatatcaaggccaacaaataaatttagcatatattagattacgccattttgaatttacgaacggacgcattatcagtgactttaacggcatgggcaaagtgaaatatcattttttaacgataaaaagagtgttatttcttgtgtatcagacaataagcattcattcaaaacctttagaaataatcaaaacacaggtattccactggttaatatattcacatatgaaatgaataaatattggaatatataaatattgaatattttgattaatccccgtactgattattcttcataatcagtacggggttgctacaacatgtattactttttcaccacaattaacggttcaatatcactctcttttttgatgaccagtgattcatcaccgcgcaaacacgtcccaccgtagttgccgccaacggtgaaggtacatacctgaatgtatttaccgtccactttcggcaaacaccacagttgctgatagatgtttttctgctcggcaaatttaccgctggttttgtccagcacctcttcatgatggctgacgaggtcgatattgctgccacagcgaccggcgatcggtttcactgcgtaacctgttttcaccagttcatcattaacagtgaaatcggtatccagcaggtaacgatggtgcgggaacagcgaccagaggatcggcagaatcgctttgttgccggggatcaccgtccacagcggctcaaagaccagcacttccgggcgcagcaatacgtcgataagacgcacttcgttttgcggatgaccggtacggattggcaccgcagcaaactcacggtcgctaacttcacgaatctgatcaaacgcggtttcccacgcccaggttttccacacgcagttaaccagtcgcccttccccatcaatcagttgcccggcagcatcccagcccagttcatccaatccacgcaagatacgcgtttcaaagcccgcctggtgcagcgcctgctccataaactgcgcgtgatagttttcctcgatatctttgtcctgcatgatatggacaaacggacgtgcacgactgtgtttccaggcaccagccaattcgttaatcagcccttccgccggattgaagccgttgcctttatagccctgctccgcccaacgttcgaggatcaagcccgcttcggtatgacaggaggcggagtcggcgttgtactcgtaaaccttcaggccacgctcatccatgcagaaatccatacgaccagtgatcatatggtgacggcgacgctgccaggagagacgcaaacgtggccagaggattttcgggatgtcgaacagcgccagcaggttgtcatctttcagcaccttgtcggttgcgtgaagatacatcaggtgcagctcgttggtggctttaattagctcctgctcggcactctcggtaatggtgtagtaatgataaggatcctgattgatcacctgaccgttggcctgcacataggcgttttgcagcggatctttttcatccagccatttaccgtcaaactggcctttgttttccaggcgcgctccgctgattttcagcagctcgcctgcaatttccggctgcggtaagctgtattcagtatcttccgtctggatcatccagcccagaatggtggtgtcatcaaaagtgtctttcagggtatagcagccgttttcgaccaccatctccagctcgcgcgtccactgttgcccttgcggcaacggggaatgaatcacgttctgttccgcaatacggactttgttgccatgcaattgggtaatgatggcgacatggccagtgtctttaaattcaccgcctttatcccagataagaagcgcacccgcgaccggcgcacgcggcgagccgttaggaaatgcctgcaatggcaggatgttgtcattaaccacttctcgcaggaagcgcagcgagaaaatctcccacgccatacccacgtcagtaaagaccacaccgtaattcagaaagagaaaacggcgagcaaattcaacgcattgccacttgtggcccatatattcgtcgtcgatatagctacggaatacggcgtcatcttcgtattcctgcggatcgagagaactgtaatctgaagagtagattgctaccccacctggggcgtagcccaataatgtcccgaacggggcatcctggctggtcgttcctttgctcatcactttacctttaacaatacaacctaagcagttggcgtaattgttgtgctctgattacctgctcagcgacattaaccggacagaggtcagactaatcatacacctcatcgcagcggctggcgcaaagggttaaaaaattcacattctgtacagcaagtgacctgctacactgcttcaacactaccactcagaaggcaactcactatgacagacaatacttatcagcccgcgaaagtctggacgtgggataaatccgctggcggcgcgttcgccaatatcaatcgcccggtttctggtccgacgcatgaaaaaacgctgcccgttggcaaacacccattgcaactttattcgctgggaacgccgaacggtcagaaagtaacgattatgcttgaggagctgctggcgctgggcgttactggtgcagagtacgacgcctggctgattcgtattggcgatggcgatcaattctccagcggctttgtcgaagtgaacccaaactcgaagatcccggcgctgcgcgatcatacgcataatccgccgatccgcgtgtttgaatctggttcgatcctgctttatctggcggagaaatttggctacttcctgccgcaggatttggcaaagcgtactgaaacgatgaactggctgttctggttacagggcgcggcaccgttcctcggcggtggttttggtcacttttaccattacgcaccggtaaagattgagtacgccatcaaccgctttaccatggaagccaaacgtctgctcgacgtgctggataagcaactggcgcagcataagtttgttgcgggcgatgagtacaccattgcggatatggcgatttggccgtggtttggcaacgtggtgttaggtggtgtgtatgatgccgctgagtttcttgatgcgggcagttataagcatgtacaacgctgggcgaaagaagtaggcgaacgtccggcggtgaaacgtgggcgtattgttaaccgcaccaacggaccgctgaatgagcagttgcatgagcgccatgacgccagtgatttcgagacgaatacggaagataagcgtcaggggtaagggttggtgttcgtcgcagcaagccatccaggccggataaggcgttcacgccgcatccggcaatcgtgcacaatgcctgatgcgacgctgccgcgtcttatcaggcctacgaaagctaatcatcacgcgctggtaatgtcgtaatccatttggcgcagtgcgtctaatgtggctttggcttcatcttcgtcgatgatgctcatggcaaatccgacgtgtaccagcacccactggcccagtagatcggcagggttaccttcacaaatcagggcgatattcacatcgcgcttgataccacatacttcaacctgcgcaagctggtgaatatcttcaccgacagccagcacctggcctggaacgccaatacacattattaactccggttattcaacttcaatacttttgacgatcagcgaatcgccggtatcgacacgcaaccgctcgccgtgacagagcggacactgcgcatcgtgctgatgaatctccaccacctggctgcaatcccagcaccaagcctgggcgggtttatagacgatatgtaaatcgcacccttgcgccaccgttccgtggcagacaatttcaaaactaaaacggacggcgctctcctcaacgcaggagagcgcgccaatttccagccacacggcggtgacgcgcttaacatcgtgctgctccgcctgccgttggataatttcaacggcgctctggcaaagagacaactcatgcattttcgccactcctgcgaccaaacagcagggcgcgacgccctgcgtgtggtacatccggattcgtgactggcagcgaaaggatcattcgtgcgcagtcatccgtcaggcgttggccctcttcaatcgacatgctgtgcgaaagcggcgacatcagcgaacaggagagatattgcgaaacaccgtccagttcgccaacggtaaaggtcatagtgccatacggcagttgcagaccaattttttcactcactttgcgcagcggccagagttgatccgggccggggaagataactgcactcagcatccacggggtgatcacacaccccgtccactgaccttcgaacagcgtaaaatcagaaacatacaccggcattgaaggatgcagaaaagagagatcgtgcatcgaacgccgggcaatttcttcaaacgctgcctgtacttgcgccttcggggaggtctggaaacctgctatctcttcagtcatgaatcgcctcccgtgggatggcttccacgccagattcacgcagcgcagccagaacctgctcaagcgcaggttcaatcattgcttcaaccgtcggcgttaagccgatgtgtggctccagcgattccgggatcacgccgaccagggtcagctttttcggaaactcgccggtgaagcgcagggccgacaagacgtcggccaggccaagctgatgcggagagattttgttggtaaacaacgccggaacttcttcatcccgcaggatcatcatcgttcccggcgcgttctttttcgagacaatggcatccgcaataatcaaatgatcgcgatttgccatgtcgccaagcagctccattcccgccgtgccgccatcgaggatctcaacataatccggcagaatgtatcgttgctctaacgcttcgacaatccgcacaccgatggcttcatcggtcagcaaaatattgccgacccctaagactaaaatacgcattacagaaccttcactgaaaccacttcgttgccgtcagcatccactacgtgtaccgcacaggccatgcacgggtcaaaggagtgaatggtacgcaccacttccagcggtttattcggatcggcaaccggtgtacccaccagcgactgctcgtaaggaccgacgtcatcattgaagttacgcggaccagagttccaggttgatggaacaaccgcctggtagttgctgatgataccgtctttaataaccatccagtgagagagcataccgcgcggcgcttcgaggaagccaacacctttgaattcacccgttgccggaatgttcggcttcacaaaggtggtgtgatcgcctttgccgatattggtgatcagtgcactgtattggttttgcaggatatcctgcaattcacagcagtgaacggtacgaccaataatacggcccagcgtggagtgcagctgtgccacttccagcgtgttgccagtcagtttctgataaatcgcaacgatttcattcagtttgttctgggtagattcgcgacctgccgccagtttcaccagcatattagccagtggccccacttctaccgttttgccgtagaaagtcggtgatttcacccaggaatatttcccgtcgtcagaccaaccatcataagccggaatggtggtgccttcccacggtgcctgcggcgcttcgtctttataccaggagtgcttcgcgctttcctgaatgcctttgatcaggtattcatcggaatgagaagtgatcggacgatacgaggacagatccgcattctcaatgtagccgcccgggaacaggaagctgccgtttttactgtcggtcgggaattccggcacgctcaggtagttcaccgcacctttaccgcgtgtcagccattccgggtagaacgcggcaataactgcggtatcaaccttataaacctgctcaacaaagtcgctcagtttgtcgatgaaagacttgatgtacatcaggcgctcaaggttcagcacgcccaaaccgtcgaggttgatcgggttcgcgacaccacctaccgccaggttctgaatgtgcggcgttttaccgcccagcagcgccacgacgcggttagcgtcacgctggcactccaacgcttgcaggtagtgcgctaccgcaatcaggttcacttccggcggcagtttcatcgccggatgaccccagtagccattagcgaaaatacccaactgaccgctggcaaccagatctttgatcttgttctgaactttggtgaactcttccggactgttcaggtgccaggtcgaaacgcctttcagcatttcggaggctttggttgggtcagcttgcagtgcagaagtgatgtccacccagtccagcgccgaaagctgatagaaatgaacaatatggtcatgcgtggtgtgcgcagccagaatgatgttacggatgtattgcgcgttaaccggaacgtcgatattcagcgcactttctgccgcacgaacggaagacagcgcgtgagtggtagtacatacgccacagatacgttgcacaatcatccatgcatcgcgcggatcgcggtttttcacgatctcttccatgccgcgccacatggtaccggaagcccatgctttcgaaacgacgccattttcgatttcgcaatcgatgcgtaaatgcccctcaatacgggttaccggatcaatagtaattctctggctcatgctttgctcgcctcatgacgattatgatcgttttgttttaaaggaggaagtatcggcagtagacgaatgagtacgatgtaagcgcaaatctcaatagccacaaaaccaatagaaatcaacagttcttcccaggtcgggaagtagtaaccgccgcccgggttgaatgccaccagcgaataggtcagacgccaggttgcacaacctaacagtgcgctcagtgctgacaggaacagcatgcgggaatcattacgcacgttcgccacacgcagaacgaccagcgggaagagcatcagcaggacttcaatccagaacatcacggagtagaagtcaccggcaaacgctaacgacagcttgtcgcgatagataagctcgccaaagcgcagcacgatgaaaatcgccagcaacacactgatggtgttggtcagcttaacaaacagactcttttcatccggaccgttgccacgcagacccgcctgcaccagcgaaccttcaaagatgacaatcgagaagcccatgatgaacgccgtcagcagcgagaacagcggcaacatttcatagctctgccacaacggatgcaccttgtagcccgccgagatcatcagcgaccccattgaagactggtgcatggtcggcagcagcgcaccgagcgcgatgatgaagaacatcaccttgtttagtcgctgtagcgacaccttccaccccagacgttcaaacagtgccggagcaaactccagtgccatcacgccgatatagatggtcatacagaccgccgtctcgaacagtaccgagttcacgttgaagtgacccggaatgtagaagtacggcaggttccagtagcgacccacgtcgatagtgatcgacaagccacccagtgagtaaccaaacagactcgccaacagcgccggacgcaccagcggatggtattgcccacggttaaagacgtataccgcccacgccagcgcccagccgccacaggcaaagccggtgccaatcagcaggtcaaacgcgatccacacgccccacgggaagccgccgttcaggtcagagacagagcccagaccgaacaccagacgcttcacaatcaggagcatacagatgacgattaacggtccaaaaatcatgaccggtttactgatgattttgccgcccagcggttgtggatcatgactcatgatcgtctcctccgtcgtgatggtcgtttttggtgttgcgacgaaccagcacggttaagcccgccagcacagccagtggtagcatcatgcctttatacagggtgtgttgaatattttcggaacgcgcaccggtagaaagatcgtccagtttcggcaggtcgagattttcataaggcacacccgtcagtaccagaacctgagtaccgccgccctctttctcgccgtacagatgcggataatatttcggcaccgtatgcaggtaagtgtcgccagatttcagcgtctgacgcggatagtggtattcgctgccaggcttcagcgccagacgttttttcgcctccgccatcagctcttcacgcgtaccgaaaatcaccgcgcccgccgggcacacttctacgcagccaggtagaccgcctttatcgagacgttccacacctttctggttgcacagctcgcacttatgcagcgcaccaaacgggttgttgtagtcgtacttcggcacgttgtacggacaggcgaccatgcagtaacggcagccggtgcacacatctttgtcgtaatggacaatgccggttttcggatcttttttcagtgcagagaccgggcacacagagacacagttcggatcgacgcagtgcatacactgtttcttaatgtacgcgtagccgttctcctcctggtctttgttgacccctgtgccgctggtccacacctgaatgatgttattggtatacggcgacagtttgtcgttgttcgaccaggtctgttccccttgcgggttacgttcagggaaattgatatcctgacacttggtgacgcaagcctggcagcctacgcacaaggtcgagtcgtacaacatccccagcgatcccggaattggcgggcggttttcagcagccgcatgactgacagacggcagcgcgcccgtcagcaatgccccgcaggaggctgctttaataaaattacgtctgttcacggttattctccccgtgagtcagcgttatctttcttttgctgacgacccagttcacgcaccgccatcacgctgacaccggcaaccaacccaaccacaccgccgagcaaaccaatagcgcctgcagagacgttgccgccctctttagcgttaacatccggtttctgtgaacgcggagtttgattttcgacgttggcaagctgatggatgcctttatggaagccgataccttcttcgttacagccatagcaagggtgaccaatcgccaccggccacacaccgccaacatcgcagaattgcagcgttgagcagttgccgtaagtttctggccctttacagccgaggtggtacaggcaccagccttcgcggtggccttcatcaccgaactctttggcaaaacgaccagcatcgaagtgcgggcgacgttcgcagtgttcgtgaatcagacggccataggcgaaggtcggacggtttttgtcatccagtttcggcggtttgccgtaagtgatgatgtgcgcaacggtcgcgaggaagttgtgcgggttcggcgggcagcccggaatattgataacggttttgcctggcagaacttcttgcaggctgactgcgccagttgggttaactccagctgcggcaacaccgccccacgcagagcaggaaccgatagcgataatggctgctgcgccttccgccgctttgcggatgtgatccacaatcggctcaccggcaaccatgcaataaataccgttatcttttaatgggatggaaccatccaccactaacacatactgccctttgtacttctcgagagcgttatgtttgttctcttcgacctgatgaccgaaggcggcggaaagcacttcgtgatactccagagagatagtctccagtacgaggttttctaccgttggatgcgttgcacgaagcagagattccgtacaaccggtgcactcctgcgcgccaatccagataactggcggacgctgcgggttagtaaccgattcggccatctctgcagcggctttgctacttaaccccatggtggcggctaatgctgcacaaagcttcatgaaatcacgacggttaatgccgtgagaatggatgagggtgttatctccagtcatttatagttattccgttgcgaagacctggcatatattttgcctcaatcgcaaaatcaataatgcgatcgatgcgccatttaccacacatttattatggttatcgatatcatgatactgcggcggggcgctaaaacgaagggaagaagcattagtgtaattaattaaagcaagataatacgtatgtttgatcaattttcgaggcgataaccggccataaaaaagcgcaacgtagaacaggaattattctcacgaaagaaatccattaccatctctttatccagtccatagcggcgcgtcagaatacccgcttcccaggcgctaagctggcgatctccggtcttttcgtacatccggtgtgagtagcctaatacaaaaccgcgtttataatcggcacagaattttgtcacattaaccgcactgtcggcatgcgttgcttttaatcccgccattaagcctttaccaaaatggttattcatcgttcacctcattcgctatatattgtcatatatagcgatattttaggcaaagaacgacttttgcgcacgctattttttcatgcttgtttaagacgtaatcccgtaagagataaacctatcaggagagatatttatcgaaccatttcagtgtcctttgccaggcaagatcggcggcagatttgtcataacggggcgtggaatcattatggaatccgtgattaacccccggatagatatacgcctcataaaccttattattggctttcaacgccgcctcgtaagcaggccagccctcgttgattcgggtgtccagttccgcgaagtggagtagtaaaggcgcttcaatcttcgccacatcggcagtgggtgcctgacgaccataaaacggcaccgcgcaggccagttccggatacgcgacagccgccgcgttcgatacgccaccgccatagcaaaatccggtaatacccactttgcctgtcgcttgcggatagcgttgcataaactcaattgcggcaaagaaatcattcatcagtttgttggatcaacctgctgttgcagctcacgacctttatcatcatttcccggataacctccaacggaacttaagccgtcaggtgccagggcgatataccccgccttcgccactcgccgtgccacatcttcgatatacggattcagtccacgattctcatgcaccaccactacggctggcgttttgccgctcatctttgcgggcttcaccagataaccccgcacctcgccgtgaccatttggcgaaggatacgtgatgtactcagcaacaatttccgggtcggtaaactctacctgagtcgccagcgcataatttggcttgagcaaatcaaacaacgctaatgccgtcatcccgcctaccgcacttcgccgcaaggttgaggaactcacgtttcgagattttcccgtgagcgtaatagtcatagtaatccagcaactcttgtgggaaatctttggcggttaaacgcggcatcgttgcactcctcagttggtgtttttttaagcaaagcataagcacgtatttttgcccagtttttcgtcactctgtgagccagactacgggatacgcgctggcgaatcgctaaactagaaacattgtttcgaaattgaacggtggaaaggagaggtcatggtctggttagcgaatcccgaacgttacgggcagatgcaataccgctattgcggaaaaagtggtttacgcctgcccgcgttatcgctcggtttatggcacaatttcggtcacgttaacgcgctggaatcacagcgtgcgatcctgcgtaaagcgtttgatttgggcattacgcactttgatttagccaacaattacgggccgcctccaggaagcgcagaagagaactttggtcgcctgctgcgggaggattttgccgcttatcgcgatgaactgattatctctaccaaggctggctacgatatgtggcccggcccttacggctctggcggttcacgtaaatacctgctcgccagcctcgaccaaagcctgaagcgtatggggcttgagtatgtcgatatcttttactctcatcgcgtcgatgaaaatacgccgatggaagaaaccgcctctgcgctggctcatgcggtacaaagcggtaaggcgctgtatgtcgggatctcctcttactcgccagagcggacgcaaaaaatggtcgagttgctgcgcgagtggaaaattccgctgttaattcatcaaccttcgtacaatttactgaaccgctgggtggataaaagcggcctgctggataccctgcaaaataacggcgtgggctgtattgcctttactcctctggctcagggattgctgaccggaaaatatctcaacggcattccgcaagattcacggatgcatcgtgaagggaataaagttcgtggtctgacaccgaaaatgcttaccgaagccaacctcaacagcctgcgcttattgaatgaaatggcacagcagcgtggacaatcaatggcgcaaatggcgttaagctggttgctgaaagatgatcgcgtgacgtcggtattgattggtgccagccgcgcggagcaactagaggagaacgtgcaggcgctgaataatctgacatttagcaccaaggagctggcgcagattgatcagcatatcgccgatggcgagctgaatctgtggcaggcgtcttccgataaatgacctgttaataacgggcgcgcgaaccgcgcccgaatcagatcagtgattatgacgagtcagtcggtcaagatagcccatcacaaatgcagaaagcacaaacgtcagatggataatgacgtaccacatcagtttgttatccgggacatttttcgcatccataaagacgcgcagtaagtgaatggaagaaattgccacaatcgacgctgctactttgtttttcagcgacgttgcgtccattttccccagccagttcagcttctctttgttctcggagatatccagctgtgagacgaaattctcataaccggaaaacatcaccatcaccagcaaaccgccaaccagcgtcatatccaccagcgacagcaacacgaggatcaaatctgattccgccatcgagaagatattcggcagtacgtgaataatctcctggaagaacttcagcgccagggcaactaacgccagcgaaaggccaaagtacacgggggcaagcagccagcgagaagcatacattgcattttcaagaaaacgttccatacattcctgtcgtgtagttaaaacgggcaacagtatatcgcaattgagtaaacagcacgcaacagcaaatcaacatatacgttaaacctttgtcgcataattctgaggtttagggatcttcctggttcccttatcaacgcatcgagaacgtctacccttaaaggacgttgaacctgaagggagaaaaacgatgtctcatttaaaagacccgaccacgcagtattacactggtgaatatcccaaacagaaacaaccgacgccaggcatccaggcgaagatgacaccggtaccggattgcggcgagaaaacctatgttggtagcggtcgcctgaaagatcgtaaagcactggtgacagggggcgattccggaataggtcgcgctgccgccatcgcttacgcgcgtgaaggggctgacgtggcgatcagttatcttcccgtggaagaagaagacgctcaggatgtgaaaaagatcattgaagaatgcggacgcaaagccgttctgctgccaggcgatttaagcgatgagaaatttgcccgttcgctggttcacgaagcgcacaaggcgttaggcgggctggatattatggcgctggtcgccgggaaacaggttgccattccggatattgcagacctcaccagcgaacagtttcaaaagacctttgccattaacgttttcgcgctgttctggctaacccaggaagcgatccccctgctaccgaaaggtgcaagtatcatcaccacttcgtcaatccaggcataccagccaagtccgcatttactggactatgcggctacgaaggcggcgattctgaactacagccgtggcttggcaaaacaggtcgcggagaaaggtattcgggtgaatattgtcgcgccaggcccgatctggacagcactgcaaatttccggcggacaaacgcaggataagatcccgcagtttggtcagcaaacgccgatgaaacgtgcggggcaaccggcggaactggcccctgtatatgtttatctggcaagtcaggagtcgagctacgtcaccgcagaagtgcacggcgtgtgcggcggcgagcatttaggttaaaaaaatgcccggttgtgaaaagcaaccgggcatcattgtgaattcactcttacctgatgtggcgaaaacgccttatccgcctacaaacgcatgaagattcaacatgttgcaatagattttgtaggcctgataagcgtagcgcatcaggcattgagcacctaatgccggatgcgtcgtgaacgccttatccggcctacaaacgcacgaagattcaacatgttgcaatagattttgtaggcctgatgagcgtagcgcatcaggcaattctactttacttcgctttggcggtttcttcgccgaccagacctatcttcaggtaacccgcctgatgcagcgtatccattaccttcatcaacgtctcgtaatcgacggttttgtccgctcggaagaagatggtggtgtctttcttgccttcggttaacgcattcaacgccgtaatcattgtttcatcggtgaccggatcgttaccgataaacatcgagttgtctgccttcaccgacagataaaccggtttttccgggcgcggctgcggcgtgctggtagaagcaggcaagttcaccttcacatctaccgtcgctaacggtgccgccaccataaagataatcagcagaaccaacatcacgtcgataaacggcgtcacgttgatatcatgcatttcgccgttatcgtcgaggttttcgttaagatgcattgccatcggatattatcctgcgcgtaatttttgtgcgacacgaaccggatgcgcagcggcgctggcttccagatccaggtcacggctttgcagcaacaatacctgcgctgcaacatcacccagcatcgctttaaagccgccaatctggcgtgcaaatacgttatagataacgaccgcaggaatcgctgccacgaggccgattgccgttgctaacagagcttctgcgatacccggcgcaacgactgccaggttagtggtctgcgtttgcgcgataccaataaagctgttcatgatgccccagaccgtaccaaacagaccaacgaacggagaaatcgcgccgatggttgccagatagccgttaccgcggcccatttgacgacccactgcggcgacccgacgctccagacggaagctggtacgttctttaataccttcgttatcgtcgctgccttctgacagttccagctcattctgcgcttcattgagcaaatgcaggcttaagcttttgctaccaaaatcagcggcgatatcgttggcctggtttaaggaacgcgcttcagccagcagttgctgctcgcgcttaaggcgacgcttctgattgaagaactctacgctcttactgaagaagattgcccaggtgactacggaggccaaaataagcccaatcatcacgcacttaacgacaatatcggcgtgctgatacataccccagacggaaaggtccgtctgcattaaattattacccactgtgtatctccaggacgcaagtcacaaaatctgcgcataataatatcaaaacgacgtcgaattgatagtcgttctcattactatttgcatactgccgtacctttgctttcttttccttgcgtttacgcagtaaaaaagtcaccagcacgccatttgcgaaaattttctgctttatgccaattcttcaggatgcgcccgcgaatattcatgctagtttagacatccagacgtataaaaacaggaatcccgacatggcggacaaaaagcttgatactcaactggtgaatgcaggacgcagcaaaaaatacactctcggcgcggtaaatagcgtgattcagcgcgcttcttcgctggtctttgacagtgtagaagccaaaaaacacgcgacacgtaatcgcgccaatggagagttgttctatggacggcgcggaacgttaacccatttctccttacaacaagcgatgtgtgaactggaaggtggcgcaggctgcgtgctatttccctgcggggcggcagcggttgctaattccattcttgcttttatcgaacagggcgatcatgtgttgatgaccaacaccgcctatgaaccgagtcaggatttctgtagcaaaatcctcagcaaactgggcgtaacgacatcatggtttgatccgctgattggtgccgatatcgttaagcatctgcagccaaacactaaaatcgtgtttctggaatcgccaggctccatcaccatggaagtccacgacgttccggcgattgttgccgccgtacgcagtgtggtgccggatgccatcattatgatcgacaacacctgggcagccggtgtgctgtttaaggcgctggattttggcatcgatgtttctattcaagccgccaccaaatatctggttgggcattcagatgcgatgattggcactgccgtgtgcaatgcccgttgctgggagcagctacgggaaaatgcctatctgatgggccagatggtcgatgccgataccgcctatataaccagccgtggcctgcgcacattaggtgtgcgtttgcgtcaacatcatgaaagcagtctgaaagtggctgaatggctggcagaacatccgcaagttgcgcgagttaaccaccctgctctgcctggcagtaaaggtcacgaattctggaaacgagactttacaggcagcagcgggctattttcctttgtgcttaagaaaaaactcaataatgaagagctggcgaactatctggataacttcagtttattcagcatggcctactcgtggggcgggtatgaatcgttgatcctggcaaatcaaccagaacatatcgccgccattcgcccacaaggcgagatcgattttagcgggaccttgattcgcctgcatattggtctggaagatgtcgacgatctgattgccgatctggacgccggttttgcgcgaattgtataacattgccacttttggacaattttgcagacattttattgtgaaaagtcttaaattgttgcgtccgggatcaaggcgtcccggacgattcaggagtacaataggcagataaaggcttaaacgctgttccacaggaaagtccatggctgttattcaagatatcatcgctgcgctctggcaacacgactttgccgcgctggcggatcctcatattgttagcgttgtttactttgtcatgtttgccacgctgtttttagaaaacggcctgctgcccgcctcatttttgccaggcgacagcttgttgatactggcaggcgcattgattgcccagggggttatggattttctgcctacgattgcgattctgaccgccgcagcaagtctgggctgctggctaagttatattcaggggcgctggttagggaataccaaaacggtgaaaggctggctggcacagcttcctgctaaatatcaccagcgcgccacctgcatgtttgaccgccacggtctgctggcgctgctggctggacgttttcttgcatttgtccgtacgctgctgccaaccatggcgggaatttccggtctgccaaaccgccgcttccagtttttcaactggttaagtggattgctgtgggtcagcgtggtaaccagttttggctatgccttaagtatgattccgttcgttaaacgccatgaagatcaggtaatgacgttcctgatgatcctgccaattgccttgttaaccgctggcttgttaggcacgctgtttgtggtgattaaaaaaaaatactgtaacgcctgacgattttcccgttcccggttgctgtaccgggaacgtatttaattcccctgcatcgcccgcattcttgccgcatcttcccccggcgtcacaccgaagtaacgtttaaactcacggctaaattgcgatgcgctttcatagccgacgcgcatcgctgctgcgctggccttcatgccgtcatggatgatcatcatccgcgccttatgcagacggtaattcttcaaatactgcaacggcgaggtactggtgacagacttaaaattatggtggaacgccgatacgctcatgttggcttctgccgccagttgctcgacgctcaggttttcggtgtatttattctcaatccgtttcagcacgcggctaatcagactgaagtgagtctggcgactgaccagcgccagtaacgcgccgccgcaaggtccggtcagcacgtagtacagaatttcgcggatgatctgtttgccgagaatacgcgcatccagtggtcgctccatcacgtcgagtaaccgctccgccgcgcataaaatctcttctgataacgtggcggagttaatcccgctggctgccatcgacggctggaaatgctcatcttcgccaatgtccatcaacagttcctgtaactgcaaaatatcgacattgagacgcaaccctgccagcggcacctctgacgtggcataggtttcgcactcaaacggcaacggcaccgtcagcagcaggtattcattggcatcataacgaaacacgcgttcattgatataaccgattttatgcccggaaaagagaattatgatgccaggctcgtacatcaccggtgtacgtgcgaaaggcgtctcgccatacaacaaacgcacatcgggcaacagtcctgacaaactattttctttatttttcagtttattaactttatccgccagcaagcggcaaatctcttcacgtttcatatcgcgtaatttcttaggaataatgcggcaatttgattgtgcgcaattttgtagcatttctccagcactctggagaaataggcaagacattggcagaaatgagcattgagagccagggcgctggcgatcacaatgaaaaacatcaggcagatcgttctctgccctcatattggcccagcaaagggagcaagtaatgaacaactttaatctgcacaccccaacccgcattctgtttggtaaaggcgcaatcgctggtttacgcgaacaaattcctcacgatgctcgcgtattgattacctacggcggcggcagcgtgaaaaaaaccggcgttctcgatcaagttctggatgccctgaaaggcatggacgtgctggaatttggcggtattgagccaaacccggcttatgaaacgctgatgaacgccgtgaaactggttcgcgaacagaaagtgactttcctgctggcggttggcggcggttctgtactggacggcaccaaatttatcgccgcagcggctaactatccggaaaatatcgatccgtggcacattctgcaaacgggcggtaaagagattaaaagcgccatcccgatgggctgtgtgctgacgctgccagcaaccggttcagaatccaacgcaggcgcggtgatctcccgtaaaaccacaggcgacaagcaggcgttccattctgcccatgttcagccggtatttgccgtgctcgatccggtttatacctacaccctgccgccgcgtcaggtggctaacggcgtagtggacgcctttgtacacaccgtggaacagtatgttaccaaaccggttgatgccaaaattcaggaccgtttcgcagaaggcattttgctgacgctaatcgaagatggtccgaaagccctgaaagagccagaaaactacgatgtgcgcgccaacgtcatgtgggcggcgactcaggcgctgaacggtttgattggcgctggcgtaccgcaggactgggcaacgcatatgctgggccacgaactgactgcgatgcacggtctggatcacgcgcaaacactggctatcgtcctgcctgcactgtggaatgaaaaacgcgataccaagcgcgctaagctgctgcaatatgctgaacgcgtctggaacatcactgaaggttccgatgatgagcgtattgacgccgcgattgccgcaacccgcaatttctttgagcaattaggcgtgccgacccacctctccgactacggtctggacggcagctccatcccggctttgctgaaaaaactggaagagcacggcatgacccaactgggcgaaaatcatgacattacgttggatgtcagccgccgtatatacgaagccgcccgctaagctttttacgcctcaaactttcgttttcgggcatttcgtccagacttaagttcacaacacctcaccggagcctgctccggtgagttcatataaaggaggaacgtatggctaatccaaccgttattaagctacaggatggcaatgtcatgcccagctgggactgggcgtctggcaagcaagtaatgaggaagtaatcaccgccattcaaaaagcgttagaagtgggttatcgctcgattgataccgccgcggcctacaagaacgaagaaggtgtcggcaaagccctgaaaaatgcctcagtcaacagagaagaactgttcatcaccactaagctgtggaacgacgaccacaagcgcccccgcgaagccctgctcgacagcctgaaaaaactccagcttgattatatcgacctctacttaatgcactggcccgttcccgctatcgaccattatgtcgaagcatggaaaggcatgatcgaattgcaaaaagagggattaatcaaaagcatcggcgtgtgcaacttccagatccatcacctgcaacgcctgattgatgaaactggcgtgacgcctgtgataaaccagatcgaacttcatccgctgatgcaacaacgccagctacacgcctggaacgcgacacacaaaatccagaccgaatcctggagcccattagcgcaaggagggaaaggcgttttcgatcagaaagtcattcgcgatctggcagataaatacggcaaaaccccggcgcagattgttatccgctggcatctggatagcggcctggtggtgatcccgaaatcggtcacaccttcacgtattgccgaaaactttgatgtctgggatttccgtctcgacaaagacgaactcggcgaaattgcaaaactcgatcagggcaagcgtctcggtcccgatcctgaccagttcggcggctaacatgcaaattctcccggtggcggtaatgttccgctaccggacttttcagaaatcatttattcccctcgcgtcccgcccgttgttactcttccttgttcaggaatgccaaatataaggacatcatcatgcagagccggaagctcttaaaagaacaactcatctatatccgggataaacgcaacggagaggtgaaaaacagatgaaaataatacttctgtttttagcagccctggcaagttttaccgtacacgcacagcccccctcacagaccgtagaacaaacagtccggcatatttatcagaactataaatcagatgccactgccccttattttggtgaaaccggagagcgggcgataacttctgcgcgtattcaacaggcgcttaccctgaacgacaatcttacgctgccgggcaatattggctggctggattatgatccggtttgtgattgtcaggattttggcgatctggtgctagaaagcgttgcgtaacccaaactgacgccgatcatgccgatgccgttgtgcgctttcgtatctttaaagatgataaagaaaagaccacgcagacactgaaaatggtggcggaaaatggtcgttgggtcattgacgatattgtcagcaatcatggcagcgtcttacaagcagttaatagcgagaatgaaaaaacgctggccgctttagcttcgttgcaaaaagaacagccggaagcctttgttgccgaactctttgaacatattgctgattatagctggccgtggacgtgggtggtttccgactcttaccgccaccaggcggttaatgccttctataaaaccaccttcaagacggccaataatcccgatgaagatatgcaaatagaacggcaatttatttacgacaatccgatctgttttggcgaagagtcgctattttcacgcgttgatgaaattcgagtcctggagaaaaccgccgattccgcccgcattcatgttcgttttacgctgaccaatggcaacaacgaagagcaagaactggttttacagcggcgcgaaggcaagtgggaaatcgctgattttatccgcccgaacagcggcagcctacttaagcagattgaggcaaaaactgccgccagattaaagcaatgagctgaattaaataacaattagccggaacaataaataaaagggaacactatatgaaaacgattttcaccgtgggagctgttgttctggcaacctgcttgctcagtggctgcgtcaatgagcaaaaggtcaatcagctggcgagcaatgtgcaaacattaaatgccaaaatcgcccggcttgagcaggatatgaaagcactacgcccacaaatctatgctgccaaatccgaagctaacagagccaatacgcgtcttgatgctcaggactattttgattgcctgcgctgcttgcgtatgtacgcagaatgataaaaaaatccccggtagcgtgtcagttgccggggatattttttaacgtccaaccgccgctttaggccgtttcttcgcaccagcattcaccggacgagattgcgtagacgacgctttttttgccgtagcaggcgtctgacgctgggtcgccatcggcgtatgtttcgtcaacgccggacgggtattgcggttctggcgacgagcttcacgcatctcttcaatggttggcgcaggcactaagcaatcgcgacggctgccaatcagatgctttttgcccatcgcttccagcgcctggcggattaacggccagtttgccggatcgtggtaacgcaacaacgctttatgcaaacgacgctgtttgtcgcccttcggtacgaagacgtcttcgctcttataaccaatcttcgccagcgggtttttcccggtgtaatacatggtggttgagttcgccagcggcgacggatagaagttctgcacctggtcgaggcggaagcggtgctttttcagccacagcgccagattcaccatatcttcatcacgcgtaccggggtgcgcggagatgaaataggggatcagatactgctctttacctgcctgttttgagtaagtatcgaacagctctttaaagcggtcatagctgcccatgcccggcttcatcatcttcgataacggcccttcttcggtatgttccggggcaatcttcagataaccgccgacgtgatgggtcgccagttctttgatatagcgcggatcttctacggctatgtcataacgcacaccagaggcaatcaggatctttttaatgcctttcagatcacgcgcacggcgatagaggttgatcgttggttcgtggttcgtgtccatgtgcggacaaatatccggataaacgcacgacaaacggcgacaagtttgttcagcgcgtggcgatttgcagcgcaacatatacatgttggcagttggcccaccaagatcggaaatcacgcccgtaaaacctggaacggtgtcgcggatcgcttcgatctcattaatgatcgaatcttcggaacggctctgaataatgcgcccttcgtgctcggtgatagaacagaaagagcagccgccaaagcagccacgcataatgttgaccgaaaaacggatcatttcgtaagccggaatacgggcattgccataggccggatgtggcacgcgcttgtatggcagcgcaaaaacgctgtccatctcttcggtagaaagcggaatagcaggcgggttgatccacacatagcggtcgccgtgtttttgcatcaatgcgcgggcacagctgggttggtttcgtggtgcagaatacgcgaagcatgggcgtacagcactttatcgcccttcactttctcgaaagaaggcagcaacacgtaggttttttcccacggtttcgggcgcggtggctgcacggttacggctttggcttcctgctttttcggtgccaccggtttgttatccgcgcacggcaaatcttcaccatacggatgcgggattgggtcgatttttccaggggtatcaagacgggtggaatccacgccgctccagccaggcagcgcctctttcacgataatcgcggtattacgcacatcgcggatttcactaattggctcgcccatcgccagacgatgcgccacttccaccagcggacgctcaccgttaccaaacatcagcatgtcggctttcgaatccaccagcacggaacggcgcacggtatcggaccagtaatcataatgcgcggtacggcgcagactagcctcaataccgccgaggatcaccggtacatctttccacgcctctttacaacgctgggtataaaccagtgtggcgcgatccgggcgcttacccgcgacgttatccggcgtgtaggcatcgtcatgacgtaaacggcgatcggcggtataacggttgatcatcgaatccatgttgccagcagtaacaccgaaaaacagattcggtttacccagacgcataaagtcgtctttgctgctccagtccggctgggcgatgatcccgacgcgaaagccctgcgcttccagcatacgaccgcaaatcgccatcccgaagcttgggtgatcgacatacgcgtcgccagtaaccaaaatgatgtcgcagctatcccagccaagttgatccatctcttcacgagacatcggcaaaaacggtgccggtccaaaacaggcggcccagtactgcggccaggagaacaggtcgcgatccggttggatcagggagatagagctcattttgcttccagaaatgataaaaaaataatcaaaggccggggattataagccggaacgaaagagaaatcgaaaggtattccatactcgccctcctcgggcgagtatgaagattacggtaccggattgaccaacagttgcccaatcgagccacggtccgccatttccagcgtctgactgttgaagtagaacgggaagtgcgcccaggaaggctgaccgaaataaacaagcagctccacttgtccgtcaacccaaacggtatctttccagcctctgtcttccgggaacggcatcgcgccattcacgttacggatctggaacattacgccttcaatatggaacgcttgcggctcgtccgcgcgtaccgtccagcgttcccacgttccttgctgcgcggtgacatcaatacggttgacgtcccacagctgtccattaatacccgggtcatcacccagactgatatcgcgactgcgaattggcgaaccagccatgatttcagttggcagcaagcgcatcggaagactgtctgtgaccagcggcagaaggccggttgggcgcagcgttagcaccagggtagaaaccagaatactggatggctcaaagaagccacgaatacgatcaacaatgctcgccgcttcgccacaggtgatcgacacttcatcgccgttgctcatatccaccagaatctcgcggcgctcgcccggtgccagcgaaagttgcttcaccgatacaggagcaggcaggaatccctgatcgccagaaatcacatgtaacgggcgaccatcgttcatctgtagttgatagcgacgagagttcgacgcgttcagcagtcgcaagcgcacccagccacgcgagacttcaacgtacgggctttgtacaccgttaaccagcagcgtatcaccaacaaagccgccgcttcccggttcgttgtattctggcgtaccaaagttatccagccgtttatcctggataatgaccggaaaatcatccacaccataatggttggggataggcagcgacttgctgacttcatcttccaccagccacattccggcaaggccgttatagacctgctgagccgtgcggttgggagtattggcgtgataccacagagtagctgcgttctggcgaatgggcagtacgggtgcccagtcagcgtttggcgacatcatccgtgccggaccgcccatcagcgggcctggtacctgtagcccggccaccgtcattgagacattttctgtcaggcggttgctgtaaataagcttaacatcgtcgcccttccagacgcggatagtcggccccaggtaacgaccattgattccccagaccgacgcgcgtgtccctggcgtaaatgaccagtgcgcacgttgtacagtcataaacagcggttgcccacggcgagattcaagtagcggcggaacgggtagcggttgctgttgcccggctgcgctggccttcaggggaacagcgcctgcacaaagtgcaatccccgatgcctgaatgaactgacgccgactgagtgacatatttgctccatgtaaaactggctaaagtaataccgtgcaggaaagtgttccccgcaaaaatacagattgccgacttaaacttttccggcggcttcgcgttctgcgacttctttatcgagctcggcgattttttgttccattatcgaacgacaatgggcagccagctcacgaacctgatctttgccatactgactgacgtcaattggcggcagcatttcgacaatcaccagaccgttgtgcagtcgattaagattaatcttattcgaagttgtagagacgcacacgggaataatcgggacgcccgccgcaattgccgcgtgaaatgctccagtcttgaacggtagcaggccgcgaccacggctgcgggttccttccgggaacatccagatggaaatacggcgttttttgaagtgattcactacttccgcaatggtgccgtgagctttagtgcgattgtttctgtcgatcaataagttgccggttaaccagtacaactgcccgaagaaggggatccacagcaagctctttttacctaccgtcaccgtcggcggttgcacgatgttcgatgctgtcaccatgtcatagttgttctggtggttagcgatatagatagcattgccgtagctttcagcgtctgtaggtttacggcactcaactttcaggccaaacagcggcgcaagacggccaaacatatgcccaaaggtggccacatgtttcgggttacgcgggctgaaaaggcagtaaatggagccgaatacacagactaagatgctgtaaatcacggtaataataagacgaaagatatatagcataacaccctctgaaggtctgagagactggcattgtacgtcacctgaaatcaggttagggcattgttaaaagccgctctctggaaaagcgtattgttaatcgcaacgcatgaataaacaacggtttcaagggaatttttatcgtttccgggggttgaatacgctgccggatgacgacttaacgtttcatccggcgttccttgcaagcgggaggaaacagcgccctccccggcatattactcttcgctatcaccgctgctggcacggcgaggagagtcgatctcaacacgatcgatacgctgcaaaccgcgcatcaacgtaccgcggcgtccacgttcgccagtgactttctgtaactcttccgggcgcagtttaattttgcgtttcccaacatgaatggtcagcgtgctttgcggcggcagaacgtacaattgcgccagaccatcttctccacgcgcggcttctgccgatggaatgttgataatcttgttgcctttgcccttcgacagctgcggcagatcacttaccgggaacatcaacatacggcctgcctgagtgattgccagcagcatatcggaagcatcttcaatcaccaccggcggcataacatgggcattttccggtaaggtgatcaaagccttacctgcacggttacgcgccaccagatcgttaaaggtgcagacgaaaccgtaacccgcatcggaagccatcagcagtttctgatcgtcgctttccatcagcatatggtcaacggtcgccccaggcggcaacgttaatttgccggtgagcggctcgccctgaccacgcgccgacggcagcgtaatcgggtcaatggcatagctacgaccggtggaatcaacaaacactaccggttggttgctcttacctttcaccgccgctttgaagctatcacccgctttataattcaggcccggcgcgtcgatatcatggcctttagcgctgcgtacccagcccatctgcgacagcacaatggtgacaggttcagacggcagcatgtcgtgctcgctcatcgctttcgcttcttcgcgttcctgcaacggcgaacgacgatcgtcaccgtaggcttgcgcgtctgcctgcagttctttcttcagcaggttattcattttacgctcggaagccaaaatgccctgcaactggtcgcgctctttttccagttcactctgctcaccgcgaatcttcatctcttccagtttggcaagatgacgcagtttcagttcgaggatcgcttccgcctgggtttccgtaaggccaaaccgcgacatcagcgccggtttcggttcatcttcattacgaatgatctcaatcacttcgtcgatattgagaaacgccaccagcaaaccttcgaggatatgcaggcgcttgaggactttctccagacgatagttcagtcggcggcgcacggtatcgcggcggaacaccagccattcggagaggatttccagcaggtttttcaccgccggacgaccatccagaccgatcatattaaggttaatacgatagctcttttccagatcggtggtagcgaagaggtggttcatcacctgatccatatccacgcggttggaacgcggcacaatcaccaggcgggtcgggttctcgtggtcagattcatcgcgcagatcgtcaaccatcggcagctttttgttgcgcatttgcgcagcaatttgctccagtacgcgcgcacctgaaacctgatgcggcaatgcgctgataaccaccgcgccatcttctttcttccacaccgcgcgcatacgcactgaaccacgtccgttctcgtagattttacggatctcggcgcgcgaagtgataatttccgcttcagtcggataatccggcccctgcacgatatccagcagctgatcgagcgtggttttcggctggtcgattaatgcgattgccgcctgagccacttcacgcaggttatgcggtggaatatcggtcgccatgccgacggcaataccggtggtgccgttaagcaaaatgtttggcagacgggcaggtagcattttcggctcctgcaaagtgccgtcgaagtttggcacccagtcagccgtcccctgccccagctcgctcaatagcagctcggaatatttcgacaaccgggattcggtgtaacgcattgccgcgaacgatttcggatcgtccggcgcgccccagttcccctgaccatcaaccagcggataacggtaagagaacggttgcgccatcaggaccatcgcttcataacaggcgctatcgccgtgcggatggtatttacccagtacgtcaccgacggtacgggccgattttttaaatttggcgctggcattcaggcccagttcagacatcgcatacacaatgcggcgctgaacaggtttcagaccatcaccaataaacggcaacgcacggtccatgatcacgtacatggagtagtttaagtaggcgttttccgtaaattcatgtagcgcaaggcgctctgccatatcgctcattaattctgattcctcaacttattcgccagccttcaaaggggcaatattgccggagatactacattatctgccgcgtcgagtcacaggagatcaacgtgaatagcgccgccggacgtgctccgacggcgataaaggcatcaatgtgccttgatatacaactctttgctgtagacataatcctggggattatgcagcggaaaaccgccaacgtagggtttaagcagtttgattaacggctgatagtagataggaatcagcggtgcctgttggttgatgatcacttctgcctgctgatacaacgcattacgctttgtcgcatcagtgatctgcgtggcctggtttagtaaggcgtcatactgcgcatttttccagtgaccgacgttttcttcactatcgcttttgagcgtgttcaggaagctggaagcatcattgtacgtcgcatcccacgactgccgagacagcatgaaatcaccggctcgtcgggcatcaagataggttttccactccattgtgcgcagcgtcacctgtgcacccagccattttttccattcggaagacaacgctatcgcggtcttttcatgcagatcgtacttgttgtagaacagctcaaagcgtagcggatgagaggcgtcgtatcccgcctgtttcagcaaggcttttgccatcgcgacgcgctcactcattggcttttgcagttcatcgaacgtcgtcgcgctaaagccttttacctctggcggcgtcagcgtggttgcgggcgttctcaaccccagtaccttttgcgcaataagctgtcgatcaaccgtaagatatagcgcccgacgcactcgcacatcgttaaatggcggtttctcaaggttgaagttgtaatattcgctgttcagacgcggaataattcgtagctcgccaggcagtgatttttcaatggcgggaatttgctgcgccggaacccaggtgagatcgacctctcccgcgcgatagcggttatagccggtgaccgaattatctagcgccagatactcaacctgttgcaatactgtatgttgcgcatcgcggtactttggatttttgcgtgcagtaatcttttcgttaactacccactgatcaagcacaaaggcaccgttgtaaaccatgttctctggcttactccagctatcgccatgtttagcgatgacatgatgaggaaccgggaacagcgtcggccaggcgagcatcgtcgtgaaccaaggaaccggctgctcaagcgtaacttcaagagtacgatcatccgtcgctttgacacccagcgatgtaacatctgctttacccgcaacaatagctgcggcattgttaatgtgcgcctgtgccagatagccagcaaaagggcttgccgttttcgggtcaaccgcgcgctgccagccgaggacaaaatcctctgccgtcagaggctgaccgtcggaccactgcaaaccgctacgcagatggaaaatatagcgcttgccgccgtccagtatctcccagcgttcagcctgagcgggctgcacctggccttcaccgtccatccataccagaccttcaaacagatccagcacaatctgcgcggcagtattctcctccaccttttgcgggtcgagcgtacctgggtcgctatgattgttgtaacgaaagacttgttgcggggcgagcggtgtgttggcgggaacgtcagcagcgtagagaggagccgcacttaccaggctgaccagccataataaatttcgcgtatacatggtattccttaccggagaaattataagcccaacaacaatacgcctgtggcattgttcgctcaaacttatcgcgagtgatttggctcacactccggtaaagaaaaaagcgagttgcccccgcttttccattaattaacggatttcattcaatagttctggatgcttatccagaacacgtaaaagtttgattgtggaaggatgaggttgggcattgcctttttcgtaacgcgaaaacgcatttacacctcccccaaaaatttcgcttgcctctttttgggtaagagagagcttttttcgaaccttcactataaattcaggtgccactgtttcggcattcaccgaagcccgaaatgcctttacttgcgccatgaaagcatctgactcttctttattcatgatgctctcttcgcaatggacacaatataaaccgtggatacctttcaatactgtttttcgtccacggaaggtgtatggaatatctttaatgccagaaaccatttctccctggtggcaaaccggacatttcatattacttctccttaaacgagacgatcagtacgtcatgaattaccgtaattttaagataaacctggcctgtaacaagcctgggtctgtaaacatcctgccagatagtatgatcagagtaggtggtcatgcttttataaaagtcgctctctgataatccaatgataacattacacataccatcaaaatccaaacctaactcatctgcatttaacagggcactacgtgttgtacgaacttgcccggcattgacaagttttttaacctgactcaaacgtgtatgtggtgtgcgtttttccataacccccgcctccctgttactttagttataacctaaaaggttaattacagcaatgaaaaagcacctaaaaggttagttagatgtacggagatagtgaccacacaaaacgtattctttaaggaaagtgattgaccatataagaaagtggcgcattagtagcgccagtttgaagcaggaatttataagggaagctggagtcaggcatcacgccaacggcacataaacatccgtttccagtcgctgctctgtcaccccttcggcaagattggtgtagtgaaacagaatcggtgctttacgcattttctcgccgcttgcaggcagccagtggcgaatgatgccccataccgtgtgtgaaatatcgtccagctcgccaagctggcgggccacggcataacgtccaccggtaagttcaccattgctcacaccataacgattatcgggaatcggttcgctaacgctgccgcagatatcaaagcgaaacgcttccggtgcggtggtggcagggtcgtcccaggcgacgccaaaagtctggctttggttaacaggagaaagccccgtctctttacgccacatgataaatttcgccacgctgtagttgagcaattcagggctacagcggtgcggcaacatcgccacaggtattgatgggaaatcgataatgtttacatccagtgtcaggtttgtcattttgcctccctgcgaaattattcccgggaacgcgtcccgggagcggtaacaattacggatttactttgcggatctgtttgacgtcaatttcaacagaattccagtctttatcgacttcaccctgaatctcaaccgtatctttcggcgtcaccgtcacgccgttccagcgtttgtggtcgatatcaacattgatagtaccgctggcatctttgaacacgtagagatcgtcagagatgcgttcaacgatattgccgcgcagggttacccaggtgtcgtcacgcagggattttgcgctttctacagtcgttacgctgccgttcggcccctggaatcctccggcctgactttgcgttgccgatgggccagaaaaaccgccctgctctgctgccatcaccggtgcgctgcacagggccattactgcgattactgctgcgaattttttcatgtttattactccctttaatgtctgtttccgagcatttaacaagatagtccttaacaacttcttaagggaaaaaaataaaatttagtgctgtacagagcgcgttacaacacggtttactggcagcaaatacggttatcgcagggatgaaaaaatgcgaattttactgatagaagatgacatgctgattggcgacggcatcaaaacgggccttagtaaaatgggttttagcgtcgactggtttacacaaggtcgtcagggaaaagaggcgctttatagcgcaccttatgatgcggtgatcctggatttaaccttaccaggcatggatggtcgcgatattttgcgcgaatggcgagaaaaaggtcagcgtgagccggtactgatcctgaccgcgcgcgatgcgctggcggaacgtgtagaagggctgcgtctgggagctgacgattatctgtgtaaaccttttgcgttgatagaagtcgccgccaggctggaagctctgatgcgccgaaccaacggccaggccagcaacgagctgcgccacggtaacgtcatgctcgaccccggcaaacgtatcgccacgctggctggcgaacccttaacactgaaaccaaaagaatttgccctgctggaattactgatgcgtaacgctggtcgggtactgtcgcgcaaactgattgaagagaaactgtatacctgggacgaagaggtcaccagtaatgccgttgaagtgcatgtgcatcatctgcgacgcaaactcggtagtgattttattcgtaccgtgcatggtattggttacacattaggtgagaaatgaaatttacccaacgtcttagtctgcgcgtcaggctgacgctaatctttttaattctggcctcggtgacctggctgctttccagctttgtcgcctggaaacaaacaacggataacgtcgatgaattgttcgacacccaactgatgctgtttgccaagcggttaagtacgctcgatctcaacgaaatcaacgcggcggatcgcatggcacagacgccaaatagattaaaacacggtcatgttgatgacgatgcgctgacctttgccatctttacccacgacggcagaatggtccttaatgatggcgataacggagaagatattccctatagctatcaacgggaaggttttgctgacgggcaactggtcggtgaagacgatccttggcgttttgtctggatgacctcacctgatggcaaatatcgcatcgttgttggccaggaatgggaataccgtgaagacatggcgctggcgattgttgccgggcaattgatcccgtggctggtcgcactgccgattatgttaatcatcatgatggtactactgggtcgtgaactcgcgccgctgaacaaactggcgctggcactacgtatgcgtgaccctgactcggaaaaaccactaaacgcgactggcgtacccagcgaagtgcggccactggttgagtcgctaaatcaactgttcgcccgcacacatgcgatgatggttcgtgaacgacgctttacctccgacgcagctcacgaacttcgtagcccgttaacggcgctgaaagtgcaaaccgaagttgcgcagctctctgacgatgatccgcaggcgcggaaaaaagcactgctccaattacattccgggatcgatcgcgctactcgtctggttgatcaactgctcacgctatcgcggctggactcactggataaccttcaggacgtcgcggagatcccgcttgaagatctcctgcaatcgtcggtgatggatatttaccacacggcgcagcaggcgaaaattgacgtgcgactgacactcaatgcccacagcatcaaacgcaccgggcaaccgctattgctaagtttgttggtgcgaaatttgctggataacgccgtgcgctacagtccacagggcagcgtggtagacgtcacgctgaatgctgataatttcatcgtgagggataacggccccggtgtgacaccagaggcactggcgcgaattggcgaacgcttctatcgcccacccggacaaaccgctaccggcagcgggcttgggctatcgattgtccagcgaatcgccaaattgcatggcatgaatgttgaatttgggaatgcggaacaaggtggatttgaggcgaaggtaagctggtaacttctctgtctatgagagccgttaaaacgactctcatagattttactaatagcaaaatataaaccgtccccaaaaaagccaccaaccacaaaccagacaaataccgagcgagaatacatatacccaaaactcgaacatttcccgcataaagagttttcttaagataagaataataagtggcgtaagaagaaaaaatgctgcaatcattgcttgcaatatacgatcttcgcctgaaacggaaggtatactgcaaatatttcctcccgactcaagcatccagtcatacttattgaaagcaaaaaaagaatctattaaccaataagtaagcattatatatagcaatgcttcaaatattgttttaattttctgctttaacatatatcagtacgctcataaaaatccatttataattatcaacatgacacgttgatacttttcatcttttacttattcaaagccatattttcaatccccaaaaaaaccgaaccaaacgtgtaaattattccggtgcgagtaagaattatgaggaatggctatcagtattgtcattttcagaaaatatttatcctgcatcggtgagtcagagtaagatcagacttttgctaaattcgcaaaagactttgcacattttgctaatttcaccgtaccgctctgtgacgtactatagtcggcaaacgtctcaccttgaggttaaaaaatgagcaacatcctgattatcaacggcgcgaaaaaattcgcccactccaatggtcaactgaacgacaccctgaccgaagtcgcggatggcacactgcgcgaccttgggcatgatgtccgcatcgttcgcgccgacagcgactacgatgtcaaagcggaagtacaaaactttctctgggctgatgtggtgatctggcagatgccaggctggtggatgggcgcgccgtggacagtgaaaaaatacattgatgatgtattcaccgaaggtcacgggacgctgtatgccagcgatggtcgtacccgcaaagatccgtcgaaaaaatacggttccggcggcctggtacagggcaaaaaatatatgctttctctgacctggaacgcaccaatggaagccttcaccgaaaaagatcagttcttccacggcgttggcgttgacggtgtgtatctgccgttccataaagcaaaccaattcctcggtatggaaccgctgccgacatttatcgctaatgacgtgataaaaatgcctgatgttccccgctatactgaagaatatcgcaagcatcttgtggaaatttttggttaactagagctcaggctttagaaggagttaaccatgcttaccgtaatcgcagaaatccgtactcgtcctggtcaacatcaccgtcaggcggtattggatcagtttgctaaaatcgttccaaccgtactgaaagaagaaggttgccacggctatgcgccaatggtggattgcgcagctggcgtgagtttccagtctatggcaccggattctatcgtgatgattgagcagtgggaaagcatcgcgcatcttgaagcgcatctgcaaaccccgcacatgaaggcgtatagcgaagccgtaaaaggtgacgtgctggagatgaatatccgtattctgcagccagggatttaatcctgccttgtttgcccggccatcctgaccgggcaatgttctttcctttaaacctcaatctccgccatgtcgcctttctcttgcaaccagttgcggcgatcttccgagcgtttcttcgccagcagcatatccatcatcgcgtcagtacgctgatcgtcttcatcatcgatagtcaactgcaccagacggcgagtgttcggatcaagcgtggtttcgcgcaattgcatcgggttcatttcccccagacctttaaaacgctggacgttcggcttgcctttcttgcgttttaattgctcaagtacgccctctttctcttcttccgtcagcgcgtaataaacctctttcccgagatcaatacggtagagcggtggcagtgcgacgtaaacgtgaccgtgtttcaccaacgcgcggaaatgttttacgaacaaagcgcagagcagcgtggcaatgtgcagaccatcagagtccgcatccgcgaggatacagattttgccataacgaagctggctcagatcgtcgctgtcaggatcgataccgatcgctaccgaaatatcgtgcacttcctgcgaagccagcacttcgtcggaagagacttcccaggtgttaaggatcttacctttcagtggcatgatcgcctgatattcgcgatcgcgcgcctgcttggcagatccgcctgcggagtcaccttccacaaggaacagctcggtacggttaaggtcctgcgcggtacaatcagccagtttgccaggcaacgccgggccgctggtcagctttttacgcaccacttttttggccgcacgcatacggcgctgggcgctggaaatcgccatctccgccagcagttcagccgcctgaacgttctggttcagccacaggataaaggcatctttcaccacgccagaaacgaatgccgcgcattgacgcgaagagagacgctctttcgtctgcccggcaaactgcggatcctgcatttttactgacagcacataggcgcagcgatcccagatatcttccgccgacagctttacaccgcgcggcagaatattgcggtattcacagaactcacgcatcgcgtccaacaggccctgacgcagaccattaacatgggtaccgccctgcatcgttgggataaggttgacgtagctttcggtcagcagttcaccgccttccggcagccacagtagcgcccagtccacagcttcagtatcaccagcgaaattaccgataaacggtttttccggcagcgtcggcagaccatttaccgcttccgccaggtaatcattcagaccgtcctgatagcaccagcgttgttcggtattgttgatctcatctttaaaagtgatctcaacgccagggcacaataccgctttggctttcagcacatgcgtcaggcgtgaaacagaaaatcgcgggctgtcaaagaaggtttcatccggccagaagtgcacactggtaccagtattgcgtttaccgcaagtgccgacaacctgtaaatcctgcaccttttcgccattttcaaaggcgatgttataaacctgaccatcgcggcgcacgttaacttctacgcgcttcgacagggcgttaaccaccgaaatccccacgccatgcaggccgccagagaactggtaatttttgttagagaatttaccgcctgcatgcagacggcaaagaatcagttcaaccgccggtacaccctcttccgggtgaatatccaccggcatcccgcgcccatcgtcaataacttctaacgactggtcagcatgtaaaataacgtccacgcgttttgcgtgacccgccagtgcttcatccacactgttatcaatgacttcttgccccaaatggttagggcgagtggtatcggtatacatccccggacggcggcgaaccggctcaagcccggtgagtacctcaatggcatcagcgttataagtttgcgtcatggtttaagttagtaattcgagttgatcgtcagagatggtgcagaccaagaaaatcgacgatcgggttgaaataatcttcgaagcccgtgaatgcgtggttgccgccttctatgacagtctggcggcaggaagcgtagtacgccaccgcctggcggtaatccagcacttcatctcccgtctgttgcagcagccagatcaaatccggcgcttccagcgggtcaatctgcatgactttaagatcgtaaatatggcgtgactctagcacatattgctgcccggtgtaggggttctcgttctgaccgagatagtccgtcagcagttcaaacgggcgcaccgccgggtttaccaccactgcgggcagcataaaacattgtgacaaccaggtggcgtaatatccccccagtgacgaaccgacaatacccagcgaatcaccgccatgttccaggacaatggattccagcagctctgccgcgtcggaaggatacggcggcaactgcggaatgatcatctcaacgtcagggtgatgttccgccagccagttttttaacaagctcgcttttgcagagcgcggcgagctgttgaaaccgtgtaaataaagaagcgtagacatcagtagccttctgaagcggtatcaggttggaaacgtgtgtccgccaggcgatgcacctcggtggtcagcgtgccatcagcatgtaactcgagagtacgccagccgggcgcgatggtatccagcgtaaagttggaacagtgcggcttaaactgcacacaggtcgacggcgttgccagcaggcggcgaccattccagtcgagatccagctcctgatgaatatgaccgcacagcaagtatttgacgtgcggaaacttcgccagcacggtatccagttcgcccgcgttacgcagactgtgttgatcgagccaactacaacccgcaggtagcggatgatgatgcagcagcagcaacgtatggcgttctggcgcatcggccagtttacgttccagccactcaagctgaaactcgctcagctcaccgtgcggcacgccaaacacctggctatccagcaacaggatttgccattgctcaccaataaacacgcgcttcgccggggagatacccgcatcctgtaacgcgctgtacatcgcgggctggaaatcgtggttgcccggcagccagacgcagggcgcacgaaaacttgcgatgccttcagcgaaatgctgataggccgcagaggattgatcctgcgctaaatcacctgtcgcgacaatcaggtcgaattcgtgctggtgtggccgaatcgcctccagcaccgcctggtaactctcccaggtgtttacccctaacagggcttcgtgcttttgtgcaaacaggtgagtgtcggtaatttgtaaaatcctgactctggcctcaccagccagaggaagggttaacaggctttccaaatggtgtccttaggtttcacgacgctaataaaccggaatcgccatcgctccatgtgctaaacagtatcgcaaccagtccgctaaaaactgattaatttgatgcttttcgtcgcgttgatgcaactttttattaggataatcataccgcgctttgaagcgaaaaatctgctggcttgaacacacttcagccaccatcgcgtcatgatacagacgcaccgtcattgacggaaggctccagtaactgatcgcgggcgcagtctgttctattgtcaccagggtagtgtatcgggtcgattccacaatcgtcagccgatattgtgcgtttgccacctgatagcttacagtttcgccgggtgcgtcattgcgcggtaacaaacggcgcaattgtgaaaagttcatctcgcacaggcgcatcatttcaggaaagtcaggtgtgtaacgcttcatttatgcccactcattttttaacgcttgatgatgcagctgcagccattgcaaagcgatgaccgacgctgcgttgtcgattttcccctcttctacccactggtatgcctgttcccggcttaccacatgaacgcgaatatcttcgttttcatcagccagaccgtgaataccgcttgcggtcgtggcgtccacttcgcccaccataattgacgaacgctcactggtgccccccgggcttgccaggaaacttaacaccggtttggtccgtttgactatcagtcccgcctcttcaatcgcttcgcgacgggcaacatcttccacactttcaccctcttcaatcatcccggcaaccatctccagtagccaaggggtttcgctggtgtcgtacgcggcaatccgaatctgctcaatcagcacaacttcatcacgcactgggtcaaagggtagcaagactgcggcgtgaccgcgctcaaaaatttcccgccgcacctcatgactcatttgcccgttgaatagacgatgacgaaatctataaagatctaatgaaaaaaagccgcgataaagtgtttctcgtgcaataatttctacatcgtttttgccaaatgtaacgggcaggttgtctggcttaagcattgttaatgtcctggcactaatagtgaattaaatgtgaatttcagcgacgtttgactgccgtttgagcagtcatgtgttaaattgaggcacattaacgccctatggcacgtaacgccaaccttttgcggtagcggcttctgctagaatccgcaataattttacagtttgatcgcgctaaatactgcttcaccacaaggaatgcaaatgaagaaattgctccccattcttatcggcctgagcctttctgggttcagttcgttgagccaggccgagaacctgatgcaagtttatcagcaagcacgccttagtaacccggaattgcgtaagtctgccgccgatcgtgatgctgcctttgaaaaaattaatgaagcgcgcagtccattactgccacagctaggtttaggtgcagattacacctatagcaacggctaccgcgacgcgaacggcatcaactctaacgcgaccagtgcgtccttgcagttaactcaatccatttttgatatgtcgaaatggcgtgcgttaacgctgcaggaaaaagcagcagggattcaggacgtcacgtatcagaccgatcagcaaaccttgatcctcaacaccgcgaccgcttatttcaacgtgttgaatgctattgacgttctttcctatacacaggcacaaaaagaagcgatctaccgtcaattagatcaaaccacccaacgttttaacgtgggcctggtagcgatcaccgacgtgcagaacgcccgcgcacagtacgataccgtgctggcgaacgaagtgaccgcacgtaataaccttgataacgcggtagagcagctgcgccagatcaccggtaactactatccggaactggctgcgctgaatgtcgaaaactttaaaaccgacaaaccacagccggttaacgcgctgctgaaagaagccgaaaaacgcaacctgtcgctgttacaggcacgcttgagccaggacctggcgcgcgagcaaattcgccaggcgcaggatggtcacttaccgactctggatttaacggcttctaccgggatttctgacacctcttatagcggttcgaaaacccgtggtgccgctggtacccagtatgacgatagcaatatgggccagaacaaagttggcctgagcttctcgctgccgatttatcagggcggaatggttaactcgcaggtgaaacaggcacagtacaactttgtcggtgccagcgagcaactggaaagtgcccatcgtagcgtcgtgcagaccgtgcgttcctccttcaacaacattaatgcatctatcagtagcattaacgcctacaaacaagccgtagtttccgctcaaagctcattagacgcgatggaagcgggctactcggtcggtacgcgtaccattgttgatgtgttggatgcgaccaccacgttgtacaacgccaagcaagagctggcgaatgcgcgttataactacctgattaatcagctgaatattaagtcagctctgggtacgttgaacgagcaggatctgctggcactgaacaatgcgctgagcaaaccggtttccactaatccggaaaacgttgcaccgcaaacgccggaacagaatgctattgctgatggttatgcgcctgatagcccggcaccagtcgttcagcaaacatccgcacgcactaccaccagtaacggtcataaccctttccgtaactgatgacgacgacggggcttcggccccgtctgaacgtaaggcaacgtaaagatacgggttatctgccgcattcttcccccttctcgcttcaatttcgaccagccatcctctattctgatgggtatttaccactggtcccggaagacaaaaatgaaacggacaaaatccatacgccacgcatcgttccgcaaaaactggagcgcacgccatctgacaccagtcgctctcgcggttgccactgtttttatgctggctggctgtgaaaagagtgatgaaacagtgtctctctatcaaaatgctgacgactgttcagctgcaaacccaggcaaaagcgccgaatgtaccaccgcgtacaacaatgcgctgaaagaagccgaacgtactgcgccgaaatacgccacccgtgaagactgtgttgctgaatttggtgaaggtcagtgccagcaggcaccagcccaggctggcatggcaccagaaaaccaggcgcaggcccagcaatccagcgggagtttctggatgccgctgatggccggttacatgatggggcgtctgatgggcggcggcgcgggatttgcacagcagccgctgttctcctcgaaaaacccagccagtccggcttacggtaaatataccgacgcgacgggtaaaaactatggcgcagcccagccaggccgcaccatgaccgtaccgaagacggcaatggcaccaaaaccggcgaccaccactaccgttacccgtggcggttttggtgaatctgttgccaaacaaagcactatgcagcgtagtgcaaccggtacctcttctcgttcaatgggtggctgataccgatggaaagagtcagtattaccgagcgcccggactggcgtgagaaagcccacgaatacggtttcaattttcacaccatgtacggcgagccgtactggtgtgaagatgcttactacaagttgaccctcgcccaggttgaaaagctggaagaagtcaccgccgaactgcaccagatgtgcctgaaagtggtggaaaaagtgatcgccagcgatgagctgatgaccaaattccgcattccaaaacacacctggagttttgtgcgccagtcatggctgacgcaccagccatcgctttattcgcgtcttgatctggcgtgggatggcactggtgaacctaaacttctggaaaataacgccgatacgccaacgtcactatacgaggcggcgttctttcagtggatctggctggaagatcagcttaacgccggtaacttgccggagggcagcgaccagtttaacagtctgcaagaaaaactgatcgatcgcttcgttgagctgcgtgaacagtatggcttccagttgctgcatctcacctgctgtcgcgacacggtggaagatcgcggaaccattcagtatttgcaggactgcgcaacggaagctgaaattgctactgagttcctctacatcgatgatatcgggttaggtgaaaaaggtcagttcacggatttacaggatcaggtaatttccaacctgttcaaactgtatccgtgggaatttatgttgcgtgagatgttctcaaccaagctggaggatgcaggcgtacgctggctggaaccggcgtggaagagcattatctccaacaaggcacttctaccgctactgtgggagatgttcccgaatcacccgaacctgctgcccgcttattttgcggaagatgatcatccgcaaatggaaaaatatgtggttaaaccgatcttctcccgtgaaggcgcaaacgtgtcgatcattgagaacggcaaaaccattgaagcagcggaaggtccgtatggcgaagaagggatgattgttcagcaattccacccgttaccgaaattcggcgacagctatatgctgattggtagctggctggtgaacgatcaacccgccggaattggcattcgtgaagaccgtgcattgatcacccaggatatgtctcggttttatccacatatttttgttgaataagccacgataccggatggcactcgccatccggtaattgttagcctatctgcaccgacagcatactcaggctgcccatttctataccctcaaccggaatggtaattggctcctgcccatcccacgcacctaacacatacaacaacggcaaataatgctctggcgttgggttcgataacgtgccaccttcatggtcgaggtaattcaccagaggatgttgttccactggcccttgccacgtcagattcgctttcacatactcattaaacgacgtcgcccacggatacggtgaactatcaccgtgccacttcactgtgcgcaggttatgcaccacgttaccgctggcgaccaacattattccttcatctcgcagcgctgccagtttgcgccccatttcgaaatgccaggcggcaggtttgctactgtcgatactcaactgcaccatcgggatatcagcgtcaggatacatcttaatcagcacgccccacgagccgtggtcaaagccccaggcttctttatccagcgtcaccgggatcggcgctaacagctcaaccagacgctgtgccagcgcaggcgaacccggagcaggataatgcgtatcgtacagcgcctgcgggaagccaccaaagtcatgaatcgtgggcggcgtctccatcgcggtcactcctgttccacgggtaaaccagtgagccgaaaccaccacaatcgcttgcgggcgtggcaatgtcatccccaacttctgccagctgcgggtatacaaattatcttccagcacgttcatcggactaccgtgacctaaaaacaatgctggcatacgtgttgaagacatgatgatatccttaactaaaggtgtcattttgatatcctcacaatacgcttgttcggcggagtaagaacccggataacaatgatgatgatcatcagttattttgacgatctgcctgaaggtgaagatttataaggagttgtcgatgtcagtacctctcattctgaccatactggcgggggcagccacgtttattggcgcgtttctcggcgttctcgggcaaaaaccctcgaaccgcttactggcgttttcgctaggttttgcggcggggatcatgttgctcatctcattaatggaaatgcttcctgccgcactagcagctgaaggaatgtcgcctgtgttgggttatggaatgtttatcttcggtctgcttggctattttggcctggaccgcatgttgccacatgctcatccgcaggatttaatgcaaaaatcggtgcagccgttgccaaaatcgatcaagcgcacagccattctgctcactctcggcatcagtctgcataacttcccggaagggattgccacctttgtcacggcgagcagcaacctggagctgggatttggcatcgcactggccgtcgcgttgcacaatatccctgaaggtctggcagtggcaggcccggtttatgcggcaacggggtctaaacgcaccgcgattctgtgggcggggatttctggactagcagaaattcttggtggtgtgctggcgtggttaatcctcggtagcatgatttccccggtggtcatggcggcaatcatggcggcggttgcaggaattatggtggcgctctcggttgatgaattaatgccgctcgccaaagagattgaccctaataataaccccagctatggcgtactatgtggaatgtcagtgatgggattcagtttagtgctgctacaaacggcgggaattggttaaaaacaacatcagaagttgtccagcgcatggacaacttctgccagcttcacgaaagccttattctaccttttcggctgtctcttctctcgtactgtttaagtatttgttccgcgcttcaagcagtgcgtctctgtcctggcgaaacgcccgacaataacgtttcaaatgcaggaaataacccaccacaaccagagcaatcaatacaatccagtaccaggcgataaacatccttttacccttaatatttaacaatactaaacatttagcgtataaatttcacatatcctttttcggatatattcatatggtcgcataataacggaacaattatatgattttgatcataatgaaaaagaatgcctgatattaatgaaattttctcatagaaagagaagcggaattaacatcttgcatagcagggaaaaataaaaaccgaagcctgctacaacttcggtttcttgattaaggcagtaaattaagcagcggttttcagctggctttacgctcatgtgcctgacggtatgccaccaggtcttcaatagtcacgagcgccatattgtgtttattggcaaactcaatacactctggtgcacgcgccatcgtgccatcgtcattagtcagctcacacagtacaccagccggtttaaagcctgccagcgtcatcagatcaatagttgcttcagtatgaccgccacgcgtcagtacaccacctgcctgagcgcgaagtgggaaaacgtggccaggacgattcagatctgacggttttgcgccatcggcaatcgctgcgcgaacggtcgtaatacggtcagcggcagaaacaccggtagtcacaccttcagctgcttcaatggtcacggtaaaaccggtgccataggcgctggtgttattttctaccatcattggcagatcgagttgtttacggcgatcttcagtaatgcacaggcaaacaataccgctaccgtggcgaatggtcagcgccatctgctcaacagtcatggtttctgccgggaagatcatatcaccttcgttttcacggtcttcatcatcaagcaccattacaccgcgtccttcacgcagcgcagccagtgcattttcaacacgttcgaaaggcgtaccaaaagaggaaagtagcgtctgattcatggtaaaaaaacctcactaaaattatggttaccagaatcagggcagtcttaggagtggcggcatatagccaaaataacgtgagcgggtccatgcccgacagaatcgttactctctcccatccggactctaaccgtcggccccggaattacaccggatctgctgtcctttgagttcgcacccaaagcgctcgcgggctttcaactgagttgatttaccgccggtggggaatttcgccccgccctgagaataagcggattcactataacgctaatgattagcggcagcaacgcatagcttcacataattctggtttatgacttacccttatcgcactacaatggcactcaacacctatcagtacagggaaactacaatgattgacccgaaaaaaattgagcaaatcgctcgccaggttcacgaatcaatgcctaaaggaatcagggagttcggggaagatgtggagaaaaaaatccgccaaaccctacaagcgcagctgacgcgcctcgaccttgtaagccgtgaagagttcgacgtccaaacgcaagtcctgttacggactcgtgaaaaactggcgctgcttgaacaaagaatcagcgaactggaaaatcgcagtactgagatcaaaaagcagccagatccagagactctccccccaacgctgtaaacattcgtctttaatgcactgtaaattatgaattaatcctctaatttatagtgctttctattaccttatcgcgtaatcccattcagaaaaccatcacaaaaatgaatgagtacaattgaaagtataattgcaatgtattttttaagttttacttaatcgatatttagataaactaattttataaaaaacacaaaataaaatatcatatttcaatgattagtagtccttaaataacagttactaatcattctcttttctacttatctttatataaaggaatattatgtccgcttttaaaaagtcacttcttgttgctggcgtagcaatgattctttccaataacgtgtttgctgatgaaggtcacggtattgttaaatttaaaggtgaagttatctctgctccatgttctattaaaccaggtgacgaagatttaactgtaaatctgggtgaagtagcagataccgtactgaaaagcgatcagaaatctttggctgaacctttcactattcacctgcaggactgcatgctgagtcagggtggaactacttattcaaaagcgaaggttactttcactacagcaaataccatgacgggtcagtctgatcttctgaaaaataccaaagaaactgaaatcggcggcgccactggcgttggcgtacgtattctggacagccagagcggcgaagtaactttaggtactccggtagtaattacgttcaacaataccaacagctatcaggaactgaatttcaaagctcgtatggaatccccaagcaaagatgccaccccgggcaacgtttacgctcaggctgactacaagattgcttacgagtaatcgcatttggccgggttcgcccggccacatcattaacggattaatgataagtggatcagatgtataaaaaattaaaattaaccacaataagcgaattgattaaaaatatttattgttcattatccgttattagactggccccctgaatctccagacaaccaatatcacttaaataagtgatagtcttaatactagtttttagactagtcattggagaacagatgattgatgtcttagggccggagaaacgcagacggcgtaccacacaggaaaagatcgcaattgttcagcagagctttgaaccggggatgacggtctccctcgttgcccggcaacatggtgtagcagccagccagttatttctctggcgtaagcaataccaggaaggaagtcttactgctgtcgccgccggagaacaggttgttcctgcctctgaacttgctgccgccatgaagcagattaaagaactccagcgcctgctcggcaagaaaacgatggaaaatgaactcctcaaagaagccgttgaatatggacgggcaaaaaagtggatagcgcacgcgcccttattgcccggggatggggagtaagcttagtcagccgttgtctccgggtgtcgcgtgcgcagttgcacgtcattctcagacgaaccgatgactggatggatggccgccgcagtcgtcacactgatgatacggatgtgcttctccgtatacaccatgttatcggagagctgccaacgtatggttatcgtcgggtatgggcgctgcttcgcagacaggcagaacttgatggtatgcctgcgatcaatgccaaacgtgtttaccggatcatgcgccagaatgcgctgttgcttgagcgaaaacctgctgtaccgccatcgaaacgggcacatacaggcagagtggccgtgaaagaaagcaatcagcgatggtgctctgacgggttcgagttctgctgtgataacggagagagactgcgtgtcacgttcgcgctggactgctgtgatcgtgaggcactgcactgggcggtcactaccggcggcttcaacagtgaaacagtacaggacgtcatgctgggagcggtggaacgccgcttcggcaacgatcttccgtcgtctccagtggagtggctgacggataatggttcatgctaccgggctaatgaaacacgccagttcgcccggatgttgggacttgaaccgaagaacacggcggtgcggagtccggagagtaacggaatagcagagagcttcgtgaaaacgataaagcgtgactacatcagtatcatgcccaaaccagacgggttaacggcagcaaagaaccttgcagaggcgttcgagcattataacgaatggcatccgcatagtgcgctgggttatcgctcgccacgggaatatctgcggcagcgggcttgtaatgggttaagtgataacagatgtctggaaatataggggcaaatccagttatcatcattggttgtgcgtcagcttatgccgttgaattcaacaaagatttaatcgaagccgaagatcgtgaaaacgttaacctttcccaatttgaaactgatggccaattacccgtcggcaaatattcactaagcactctgattaataataagaggacgccaatccaccttgacctccaatgggtattaattgataaccaaactgcagtttgcgtgacaccagagcaattaacattattaggatttactgatgaatttattgaaaaaactcagcaaaacctgatcgatggttgttaccctatcgaaaaagaaaaacaaattacaacttatctcgataaagggaaaatgcaattatccatatctgcacctcaggcatggttaaaatacaaagatgcaaactggacgcctcctgaactttggaatcatggtattgctggggcatttcttgactacaatttatatgcctctcattatgcaccacatcagggcgataattcgcaaaatataagttcctatgggcaggctggggttaatcttggggcctggcgcctgcgtactgattaccagtacgatcagtcatttaacaatggcaaaagccaggcgaccaacctggattttccgcgtatttatttgtttcgcccaatcccagcaatgaatgcaaaactaactataggtcaatacgatactgaatcctctattttcgactctttccatttttctggcatttcgttgaaaagcgatgagaatatgttaccgccagacctacgtggttacgcaccgcaaatcacgggtgtcgcacaaacgaatgcaaaggtcactgtctcacagaacaaccgtattatttatcaagaaaatgttcctccaggcccatttggctattaccaatttattcaatacattacaggggcaacttgacgtcaaggttgaagaagaggacggacgcgttacgcaatggcaagttgcatctaatagtattccttatctgacgcgtaaagggcagattcgctacaccactgctatgggtaaaccgaccagcgttggtggtgattccttacaacaacccttcttctggactggtgaattctcatggggttggctgaacaatgtatccctgtatggtggttcagttttaacaaaccgtgattatcaatctctggctgccggcgttggttttaatcttaactcattaggttcattatcttttgatgtcacacgatctgatgctcagttgcataatcaggataaagaaacgggttatagctaccgcgctaactattcaaaacgttttgaatctaccggtagccagctcactttcgctggttaccgtttctctgataaaaactttgtgacaatgaatgaatatatcaatgacactaaccattacacgaattatcagaatgaaaaagagagttatattgtcacgtttaaccagtatcttgaatcattaaggttaaatacatacgtaagtttggctcgtaatacttactgggacgccagcagtaatgtgaattattcattatcacttagccgcgattttgatatcgggccattaaaaaacgtctccacttctctaacatttagccgaataaactgggaagaagacaaccaggatcaactgtacctaaatatttcgattccctggggaactagtagaacattgagctatggtatgcaacgaaatcaggataatgagatttcgcatactgcttcgtggtatgactcttccgatcgaaataattcctggagcgtttctgcttcaggcgacaatgatgaattcaaagatatgaaagcgtcactacgcgccagttatcagcataataccgagaacggtcgactctacctctccggtacatcacagcgagacagttattattctctgaatgccagttggaatggttcattcactgcgactcgccacggtgccgctttccacgactatagcggtagtgctgactcgcgttttatgatcgacgcagacggcactgaagatattccgttgaacaataaacgcgcggtaactaatcggtatggcatcggagttattccatcagtcagcagttacataacaacatcattaagtgttgatacccgaaatctgccagaaaatgtggatatcgaaaactcggttatcaccaccaccttaaccgaggggtgctattggtacgccaaacttgatacccgcaagggctaccaaatcataggggttattcgcctggcagatggtagtcatccaccactggggattagcgtaaaagatgaaaccagccacaaagaattaggactggttgctgatggcggctttgtatacctcaacggcattcaggatgataacaaacttgctttacgctggggtgacaaatcttgttttattcaaccacccaatagcagcaacttaaccaccggaacggctattttaccgtgtattagccaaaattaattcaggatgaaactaatgcgctacttaaatacaaagaatatcattgcagcaggagtattactctcctgtatgagcagcattgcctggggtgccatcatcccggatcgtacccgtatcataatgaatgagtcagataaaggcgaagcattaaaacttactaatcaaagtaaaaacctgccctatctggcccaaacatggatagaagatacgaaaggcaataaatcgcgtgactttattgtcactgttcctccaatggtgcgtttaaatcccagtgagcaaattcaaataagaatgataactcaggaaaaaattgctcaacttcctaaagacagagaaacgctcttctattttaacgtgcgagaaataccgcccaaaacagataaaaaaaatgtgatgcaagtcactatgcagcacgcattgaaactattctggcggccaaaagccattgaattagaagacgatggggtaatgacttacgaaaaagttgaaatcattcgtagaaatgacggttcgatccgctttaacaataagatgccttatcacgttacgctgggttatatcggaacaaatggggtaacgatgttaccacaaacgcaaagcttaatggtaaccccttttagctatgcaaatacgcagtttaaaaatgttccgtcaacttttcaggtgggttatatcaatgactttggtggattaagtttttatgaaataaactgccctgtagtaaataacatttgtaatatttctgtagccaaccgagatcaataatatgcgctacttgttaattgttattactttttttatgggttttagttcattacctgcatgggcaatggactgctatgctgaacatgaaggtggaaataccgttgtcattggttacgtaccaagaatctctatccccagcgatggtaaaaaaggtgataaaatctggcaaagcagtgaatattttatgaatgttttctgtaataatgcactaccaggcccatctccaggagaagaatacccatctgcatgggcaaatataatgatgttgttagcatcaggtcaagacttttataatcaaaactcttatactttcggtgtaacttataatggggttgattatgattctacatctccactacctattgcagcacctgtatgtattgatataaagggagccggaaccttcgggaatggctacaaaaagcccgcagtctgtagtggcggtcctgaaccgcaattatcagtaacttttccagtacgagtgcagctatatattaagctagctaaaaatgccaataaagtaaataaaaaacttgtattacctgacgaatatatagcacttgaatttaaaggtatgagcggagcaggtgctatagaagtagataaaaatctgaccttcaggattcgcggattaaataacattcatgtccttgactgctttgttaatgttgatctggaaccagctggatggcgttgtcgactttggtaaaataaattcccgaacaattaaaaataccagcgtgagtgagacgtttagcgtagtcatgaccaaagatccgggtgcggcctgtactgagcagtttaatattttagggagttttttcactacggatattttgagtgattatagccatctggatataggtaatggtctgctattgaagatatttcataacgatggaacagcaacggaatttaaccgcttctcacaatttgcttctttttcatcgtctagtgcgccttcggtcaccgcaccattcagggcagaactgagtgcgaacccggcagaaacggttgttgagggaccgtttagtaaagacgtaatcctgaaaatcacctataactagtatctaatacaaacactaaaacgggccatcaggcccgttatatcagtgctctaactccagctctcttgcctgcatcatctgttgacaataccaggcataacgtgcgcaaaaccaggttctatgttcttcatccatgttaccagtaacggccagaatatcgaccgggcgaccttctgcgtgcattctggcaaaactacgcgccaggaaatcgaaattatttaaagaattaagactatgatccataagcacatcctccggttatcgcataccttttaaggccatatgctttttctgatttcagtattccccaatcagtgtagtgcctttaaacataacgtgcgtaaatatattgtccccgatcacactttttagtgaaaaataaaaaaccatattaaaagactttctcttccagaacttctctaacctgtgttattattaacacagataaatgtaagcaaggaaactattacaaagtaaatattgcgtcactaaatggacattggagtgatatatgattttattcgccgactataacaccccttatcttttcgctatttcctttgtactgttgatcggcctgttagaaatttttgcgcttatctgcggtcacatgctctccggtgctcttgatgcacatcttgaccattatgattctataaccacaggtcatattagccaggcacttcattatctcaatattggaagattgccagctctcgtcgttctctgcttactggctggtttttttggtcttattggcatcctgttgcagcatgcctgcatcatggtctggcaatcaccactgtcgaacctgttcgtggttcctgtcagtttactgtttacgattattgcggtgcattataccggtaaaatagttgcgccctggattccacgcgaccatagttcagctattacagaagaagaatatattggtagcatggcgttaattaccggtcatcaagccacttcaggtaatccctgcgaaggaaaactcaccgatcaatttggccaaatacattatttactactggagcctgaagaaggaaaaattttcactaaaggagacaaagtgttaattatttgccgactttctgcaacgcgatatttggcggaaaataatccctggccccaaatattgtaatttattaatcaaaaggaaatttaataatggatgatattgttaattctgtgccctcctggatgtttaccgcaattattgccgtatgcattctgtttattattggaattattttcgccaggctctatcgtcgcgcttcggcagagcaagcttttgttcgtactggtttaggtgggcaaaaagtggtaatgagcggtggcgcaatcgtgatgccgatctttcatgaaataatccccatcaatatgaatactctgaagctggaagtcagccgctcaaccattgatagcctgattacgaaagatcgtatgcgcgtcgatgtagtagtcgctttctttgtgcgggtaaaaccttcagtagaagggattgccaccgctgcccagacgctggggcaacgcaccctgtcgcctgaagacttacgtatgttggttgaagataaatttgtcgatgccctccgtgcaacagctgcgcaaatgaccatgcatgagttacaggatacccgcgagaactttgtgcagggggtgcaaaatacagtggcagaagacctgtcgaaaaacggtctggaactggagagcgtttcacttaccaactttaaccagacctcgaaagaacatttcaatccgaacaatgcctttgacgccgaaggtttaaccaaactgactcaggaaacagagcgccgtcgccgcgaacgtaacgaagttgaacaggatgtagaagttgcggtgcgtgaaaaaaatcgcgatgcgctatcgcgcaagctggagattgaacagcaagaagcgtttatgacgcttgagcaggagcagcaggttaaaacccgtactgccgaacagaatgcacgtattgcggcttttgaagctgaacgtcgtcgtgaagcagagcagacacgaattctggctgaacgacagattcaggaaacagaaatcgaccgcgaacaggccgtccgctcaagaaaggttgaagctgaacgtgaagttcgcattaaagagatcgaacagcagcaggtcaccgaaatcgctaaccagacgaaatcgatcgctattgccgccaaatcggaacaacagtcccaggcagaagcgcgtgctaatctcgcacttgcagaagcggtaagcgcccaacaaaacgtagaaaccactcgccagactgccgaagccgatcgtgctaaacaagttgccctaatcgctgccgcgcaggatgcagaaaccaaagcggttgaactgaccgtgcgggcgaaagcagaaaaagaagccgcagagatgcaggcggcggctatcgttgagttagccgaagctacacgtaaaaagggtctggcggaagcagaagcacaacgtgcgctgaacgatgctatcaacgtactttctgatgaacaaaccagccttaaattcaaactggccttgttgcaggcgctgcctgcggtaatagagaaatccgttgagccgatgaagtcaatcgacggtatcaagattattcaggtcgatggtctgaatcgtggcggcgctgcgggtgatgcaaacacgggtaatgtggggggcggaaacctggcggaacaagcattatcagccgctctctcttaccgcacacaggcaccgctgattgactccttgctcaatgaaattggcgtttcaggcggctcactggcggcattgacttcacccttaacctcaacaactcccgtcgaagaaaaagcagagtaaaccctcttccaggaataatccctggcccaaaaagccggggattttttatatctgcgttccgctaaaaagtgcaaatgatcaggttgttgcagcattttgcgtgacggctcggggaaggcaaaactgcatcagagaaagcattgcgtggggtctggcgctcatcaacaatcggggagtcagcagggggctgaaacgggaaagcccctcccgaagaagggggccttacagaaggaaagggttatgatgaagctcgtcatcatactgattgtgttgttactcgtaagtttcgcagcttattaacagccaatcagaggggggagaaatcctccctcacccttgttcctttactttaggttgaaaaaaaatcagcgtcaagaaggtttcattaacacatatccctggcccaaaaagccggggattttttatatctgcgttccgctaaaaggtgcaaatgctcaggacgttgcagcgttttgcgtgaccgctcggggaaggcaaaattgcctctgggaaagcattgcgcggggtccggcgctcatcaacaatcggggggcagcaaggggctgaaacgggaaagcccctcccgaagaaggggccttgtataaggaaagggttatgatgaagctcgtcatcatactggttgtgttgttactgttaagtttcccgacttactaacaactcatcagaggggggagaaatcctcccttacccttgttcctttactctaggttgaaaaaacaacagcgtcaataggcctgccatgtacgaagcgagatctgtgaaccgctttccggttagccttttttatcctgttggatcttcttgatgatgttggtcgtcgagcaaccgtcttcaaagttgagcaccaacacttcgccaccgttggcccagacttctttactcccggcaatctcttctggtttatagtcgccgcctttcaccagcagatctggcaagatcccggcgatcaagcgctgcggcgtgtcctcttcaaacgacactacccagtcgaccgcttccagtgcgcccagcacaatcatacgctgttcgagtgggtttaccgggcgggaatcccctttcagccgtttggtggaggcatcgctgttgacggcaacaatcaagcggtcacccagcttgcgggcatttgccagataagagacgtgcccggcgtgcaggatgtcaaagacaccgttggtcatcaccactttttcaccacgtttacgcgctgccgctacggccagcttcagttcctcttcggtcatcacgccaaagcctgtatctgcacgtccacgtacagcattttccagctcgatcggcgaaaccgtggaggttcccagtttgccgaccaccacgccagccgccgcattggcaaagaagcaggcttcttccagcgaattacccgctgccagcgttgccgccaggacgccaatcaccgtgtcgcccgcaccggtaacgtcatacacttcctgcgcttgggttggcatatgcagcggcgctttacccggttgcagcagcgacataccctgttcggaacgggtcactaacagagccgagagttcgtaatcggcaatcagtttcatgccgcgctcaacaatctcttcttcggtcttacatttaccgacaacagcttcaaattccgagagattcggcgttaacagcgtagcgccgcggtagcgctcaaaatcggtaccttttggatcaatcagcaccggaacacccgctttacgcgccagttggatcatctgctgtacgcttgccagcgcacctttggcgtagtcagaaagcaccagcgcgccaatcgaactcagcgcctgattaatccgctcgtgcagcggctgcggatcaacaccttcgaaaccttcttcaaaatccagacggatcagctgttggttgcgggaaagtacccgtaatttggtaatggtcggatgcgtcggtacagaaacgaagtcgcatttgacgttgacgtcggccagagatttactcagcgcgcgcgctgcatcgtcaatgcccgtcaacccgaccaggcgtgcattagcaccgagagaagcgatattcatcgccacgttagccgcgccgcccggacgttcttcgatggtattcactttaaccacgggcaccggcgcttccggcgagatacgactggtggggccgtaccagtaacgatccagcatcacatcaccaaccaccatcactcctgcacgttcaaactctggcagcgttactttcattcctgtctcctgagagattcaaaatttgcgcgcgataataccatacttcattcttccaccagccacttctgccagcttgcccgcaccagttcacgctctgcggtgaagcaatcctccgacacatggcccggcaattcctgtaatgccagatgatgaagttcatcgcgaagcgtagtgtaagcacgggtcagcgccatcgcttcctgctcttccataatgtcgttttgcgccagtagttccagaatacgcacgttgtctgaccagcgcgttaacttcggtttttcatgagcgtagcgcaacaccagatattgggtaataaattcgatatcggtaattcccccttcatcagctttgatatcaaagcgatcgcgatgtttattgccgagatgagcgcgcattttctcgcgcatttcccgcacttccgtttgcagagttttaccttcacgcggcagcgtcataatctcgcgacgcactgcgtcaaagtgcgcggtgagctgcggatcgccgtacactacacgcgcacgcaccagcgcctgatgttcccacgtccaggcctcgtttttctgataatcggcaaatgcttctgcggatgtcaccagcattcccgccgccccggacggacgcagtcgagcatccacttcatacaaaatgccggaagaggtacgcgtactgaacagatgcataatgcgttgcgccagacgcagataaaactgccgcccgtcgatttcccgctcaccgtcagtcatcgcatccattgggcaatcatggaggaagataaggtcaagatcggaactgtagcctaactcccagccgcccagcttgccgtagccgaccaccgcaaaaccacgcccttcgcgttcgttcaggtgattcggcttaccgtagcgggcaaccatttgaacccacgcctgctgaacgacggcatctatcatggcttccgccagccaggttaagtgatcgctcactttcatcaccggtagcgtaccggcgatatccgctgcggcgatgcgtaacagctgcgcctgtttgaactgacgcagcgcctcaagctgttgctcttcgtcatcttccggcacgcgcagcaaatactggcgcaactcatcgcggtaggcatcggtcgccgtcggctggtaaagggtgtttggatcgagcaattcatccagcaataatggataacgcgccagctggctggcaatcatcggcgacgcggcacacagagaaatcaaatgtttaagcgccgcggggaattcactgagcaattctaaataggtggtgcgggtaacaatccccaccagcaaggcggtaatgcgcgacagcgtaacggcagcgtcttcacgcgcacagacatcacttagcagatgcggcatcagatggtcgagcacctgacgtcctcgcggcccgatggtgcgcttatccagctctttgcggaaatcggcaatcagcgttagcacctgtttgcgatcatcctcgctaagatgcgccagcactggcgtagtgtcatcttcctgcaacgcatcctgccacagctcacgccactgttccgacagcgactcttcctgagtttcactttcatcgtcgccaatcaattcattaaacacccggcgcacattggtcatatgtgcggtcagcgccccggtcagttgcggccagtcagcaaagtccatcgcccacgccagccgcgcacgattaagctcatcagaaggaagcgtctgggtttgttcgtcgttaatgctttgcagcaggttttccagacgccgcaggaacagatacgccactcgcaattgttcagcatcgttttcagaaagcagatgcagctcggcaatggcgctgagcgttggcagtaaagagcgcgattgcagcgacggttcgcgtccgccgcgaatgagctggaacacctgaacgataaattcaatttcgcgaatgccgcctgcgccgagtttgatattgtcggtcaaaccacgtcgacgcacttcacgggcaatcatccctttcatgttgcgcagcgactgaatcacgctgaaatcgatgtaacgacggaaaacaaacgggcgcagcatcgcacgcaactcgttagcatagacgccttcgctatcgcccataatccgcgccttgaccatcgcgtaacgctcccagtcgcgcccctgctcctggtaataatcttccaacgcggcaaagctcagcaccagcgggccactttcgccaaacggacgcagccgcatatccacgcgatagacgaagccatcctgcgttggttgatccagcactttaatcagccgctgccccatgcgggtaaaaaactgcgcgttatccagttcccggcgtccaccctgcgtacaaccatgttccggccaggcaaaaatcagatcgatatcagaggagaaattcagctccccaccgcccagcttacccatgcctaaaatcagcagcggttgcgcttcgccctgcgcattgcacggcgttccccactcgcggcagcaggcgtcatacagccagtcacgcgccgcaacaatcagcgtctccgccagatagctgagctgctgcaatatgctctcttcagtaaccagtgccagcgtttgcgcccaggcgatgcgcaccataatgcgccgccggaatagccgcagctcgcgcattaacccggcttcgtcactcacattacagagcgcctcctgcaaccatgccgcgtaatgctgccattcgtcggcctgcggcggttggctttccagttccgtcagccactctggatgcgcaatcacgctgtcctgcacaaaatcactaaaagtaagtactgacttcgcctgtgcgctaagtgattcctcggctaaaggctctggcagccgctcaacaacggtctgccagtactgctgtaacggtgaagagagcggcttcataagcgattttatccttgcctgattaacgttttccgctgtgcaaccagaacggttcctgattgtttgcctcattacggaaatgttcaatttcgatgcgttgcccggtcgcaatagcgtgatgcagcccctgccagttctccagccaggcttgcgcgacgacaggatcatagtaacccgccagcaacagtattgagtcaatatcacgcgtcaggcgtggcaactggtcacggtagcgatcgcctaacggctggcagaaaacgcttttcagttcagcggcatggcgggaaagatggatatcggcaaagcgtttgaaggagtcgctgattttgccctgcgctttggcatctaaaaatggctgccatgctttgcttaccaaccattcggtcaacgccagcttcgccattgccgtttcggtagagtagaccgccgtcacggcagacaccgcagaagcaatggtcgcctcgcattgagtcagcagatcacgtaagtgagtgctcgctttacgcggcacaataccaccgaacagcatcagcgtatgacggaccaggctaatggctgccagcacctgttctttcgccgcatcgttgccgcgtacccacagttcttcatgatactgccattgcgctaacgccagctcgagcgccgcttccagcccctgttccacatcggcttttgccgcaacatgcaaaatggtggtcggtttgatttcacgcgccggattgccctgcgccagatgatagccacgcgccgctttgctcaggctgccctggcgtaatccggtttgcgataccagttggttcgccagtttcagcaccgcgcgcgtgtcgccgctaagcagttccagttccagctcacagataggttcagcaaattcacccgctttcacttccccctggtcgagggcgatttcaatttggctaccatcgaccgccaccagccatttttcgcgataaaaatcggtgctgaacagcggctgcacgcgggaggcgagatcggcgggcaattcgccgttcggccagacttccgtcggtaactgcgccaggtcgagcgtcggttcgctcaacgccacgttatattccgggcgctgatgtaagccgcctgtcactcttcctgcaactttcatggtcatctcatagcgaccgttttcgccacgaatacgtaagcccatatcgtgcccacgcagccagttatccggcgtttcgtagtaaatattcagcaactgcacggggtcatggtgctcgccgcccagcgtattgagatggtcacgcaacgcctcaacggcactgtgattaacaataaactttaattcgatttcctgagccatggcctttacttatcggttatgtcacataagtgacgatgaacggcgaacttaatgcgatcttttttgtcagtagatagtattttgcgccaaattgccatgcaacgggcaatttgacgggcgtaaaagtttgaagcagtggcaagacctgacacagaggattccgattgatgtcgaatgctttgcgtagcgacactgatgccactactatcgttccactttccatgacaataacgacagcctgatgccaaaattacgcctgatcggattaactttactcgcacttagcgcgactgccgtctcacacgctgaagaaacgcgctatgtttccgacgaactgaatacctgggtccgcagcggtccgggagatcattatcgcctcgtgggcacggttaacgccggcgaggaagtgaccttattacaaactgacgccaacaccaattatgcccaggtgaaagacagctctggccgtaccgcctggatcccgttgaaacaacttagcactgagccaagcctgcgctcccgtgtgccagatctggaaaatcaggtcaaaaccctgaccgataaactcaccaatatcgataacacctggaatcagcgcaccgcagaaatgcagcaaaaagtggcgcagagcgacagcgtgatcaacgggttaaaagaagaaaatcagaaactgaaaaacgagctgattgtcgcgcagaaaaaggtcgatgccgccagcgtacagctggatgacaaacagcgcaccatcatcatgcaatggtttatgtatggcggtggcgtgctggggcttggcttgctgctcggtctggtactgccgcacctgatcccaagccgcaaacgcaaagatcgctggatgaactaaatcgccttcttcgttgcactgtcttattattaggaattgtgtatttgacgaagggatgatggcgtgaagatttatctggtcggtggtgctgttcgggatgcattgttagggctaccggtcaaagacagagattgggtggtggtcggcagtacgccacaggagatgctcgacgcgggctaccagcaggtaggccgcgattttcctgtgtttctgcatccgcaaacgcatgaagagtatgcgctggcacgtaccgaacggaaatccggttccggttacaccggttttacttgctatgccgcaccggatgtcacgctggaagatgatcttaagcgtcgcgatctgaccattaatgcgctggcccaggacgataacggcgagattatcgacccgtacaacggtctgggcgatctgcaaaatcgtctgttgcgccatgtttcccccgcttttggcgaagatccgttacgcgtattgcgcgtggcgcgttttgctgcgcgttatgcccacctcggttttcgtattgccgatgaaactctggcgttgatgcgcgagatgacccatgcgggtgaactggaacacctgacgcctgaacgggtatggaaagagacggaaagcgccctcaccacccgcaatccacaggtgttcttccaggtactgcgcgattgcggcgcactgcgcgttttattcccggaaattgacgcactgtttggcgttccggcccctgccaagtggcatccggaaatcgatacgggtattcataccttaatgacgctctcaatggcggcgatgctgagtccgcaggtcgatgtccgtttcgcaactttatgccacgatctcggtaaagggctgacgccgccagaactctggccgcgtcatcatggtcatggcccggcgggtgttaagttagtggaacaactatgccagcgtctgcgcgtgccaaatgaaattcgcgatttagccagactggtggctgagtttcacgatctcatccacaccttcccaatgctgaacccaaaaaccatcgtcaaattatttgattccatcgatgcctggcgtaaaccgcagcgtgtcgagcaactggcgctgaccagcgaggctgacgtgcgcggcagaaccggttttgaatcagcggactacccgcaaggccgctggttgcgcgaagcctgggaagtggcgcagtcagtgccgacaaaagccgtcgttgaagcgggatttaaaggtgtggagattcgcgaggagctgacccgacggcggattgcggcggtagccagctggaaggaacaacgttgcccaaagcctgaatgagtattgggcattttgccggatgcggcgtaaacgccttatccggctacatgtcaacgacagttgtaggcctgataagacgcgcaagcgtcgcatcaggcgttgattgccggatgcggcgtgaacgccttattcggcctacgcaatcgttgacaacgccaagcatccgacactattcctcaattaaaagaacacgacatacaccgcagccgccacaataaagcgataaatggcgaacgggataaacgaaatgcgcttaatcaattgcaggaaggttttaatcgctatcagcgccaccacaaaagcggtgataaacccaacggcaaacatcgggatatcgccgcttgtcaggaagccccagcttttgtagagatcgagcgccgttgcgcccatcatcatcggcaccgccagcaggaacgaaaactcggaagcagcgtaacggctcacccccatcagcatcccacctgaaatggtcgccccggaacgggagaaacccggccacagcgccagacactggaaacagccaatcataaatgcctgacgataggtcatatcatcaagacccggcgcacgcggctctttcggcttcaggcattcggcggcaatcagcaacaaaccgccaacgaccagcgcatacatcacatttatcgggttaaacaatgacttaatcgtgtcgtggaacaacagccccaataccaccgccggaatcatccccagcaaaatgtggatcagcgttaaacgacctttgctttcaccttcgtgctgcaacgggcggccaaagtggatgccaatcaggccaaacagacgccgccagaacatcactactaccgccagaattgatcctaactggatcacaacttcaaaggttttcgccgtgtcgccctcaaaccccaacaagtgaccgacaataatcatatggcccgtgctggataccggcagaaattctgtcaatccttcgaccacacccaatattgccgctatcagcagcgagtgcatatcgctcatcaataaacccctaaattattaaaatgtaccgcttgtccgaactactgcgtatgaccaggttataaccgtttggtttaacagctgtaaaattaattattttctttcagattattgccacgctcaatgattacgccaacattcgccgcccgcgccactgcgcctggcttgctgagtttgatacgcacccacggcgagttgaagcgtgctaacagcagctccgccacctcttcagccacgcgttccaccagcgcaaaacgcgccccctcgacgtggctgaccaccgtttctgcaatgtcagcgtaactgaggcaatccgccacatcatcacttttcgccgctttacggttatcccacgccatttcgatatcgaacactaacttctgttcgatggtctgttcccagtcgtaaacaccaatagtggtgattaccgaaagttgctctataaatacaatatccatcacgtcctgcctgctttttggctaaccggataccacttccggcgaaatgtgcgtattatccacagattcatcgttgaacacgaattttcaaaacggaacagcttatgagtgcaatcgcgcctggaatgatcctcatcgcgtacctctgcggctccatttccagtgccattctggtttgccgcttgtgtgggctgcccgatccgcgaaccagcggctccggcaatccaggcgcaaccaatgtgttacgtatcggtggcaagggagcagccgtagcagtactgattttcgacgttctgaaaggaatgttgcccgtctggggcgcgtatgaattaggtgtcagccccttctggctaggcttaattgccatcgccgcctgtcttggacacatctggcccgttttcttcggatttaaaggaggaaaaggcgttgctaccgcttttggtgccatcgcacccattggctgggatctcaccggagtaatggcgggaacctggttactgaccgtgctattgagcggatactcgtcgctgggagcgattgtcagtgcactgattgctccgttttatgtctggtggtttaagccacaattcaccttcccggtttcgatgctctcttgcctgatcctgctgcgtcatcatgacaacatccaacgtctgtggcgtcgtcaggagacaaaaatctggacgaaattcaaaagaaagcgcgaaaaggatcccgagtgatttctggtggatctacatgacctgatagccttcatcgggcttgcccagccgttgctggcaccatgccgccagaaattccacgcagacacgtaatttcatgctgcgatagagcggctcccggtaaacagcccagatattggcgctttgtgcatactctggcaatacttgcaccagtttgccactctccagaaacggcaacacatcccactcggaacgcagcataatccctttgccctccagcgcccattgcagcacaatctcgccgctattggaggaaagatgcccgcttaccttcaccgattttttctcctgaccgttccccaactcccatattccatgggtcatatcgcgctctttggtcaccagacagtcatgacgacttaattcctgtagggattgtggctgcggatatttttgcagatactcaggtgctgcgcataatattcttttattttttgtcaaaagatgcgcaatataataatcaggaatttcgtcattaatacgaatatccagatcaatattatcctgcactaaatcaatttgccgatcgaacaattcaaaatgcacctgtaactcaggataattgcgcatcagttcggtaatagctggcgcaatatggctgcgcccaaaaccaaaactgcaaccaatacgaatcatcccctccgggcgcgttttgatttgcgtgacgtcatcgaccagtcgctgatattgggtgaggatttccaacgcatgttcgtaacaacgttggccactttcagtcagcgccacgccgcgagcggagcggttcagcagcgttgttgccagcgtattttcaaggatttggatccgcttggtgacaaatgcaggcgtctgcccaagcgtcgccgctgcggcgctaaaactcccgctgtgaacgatttctaccagtacctgcaagtctttggctaaaggccagctattcagcatcgttaattatccgcagttgtgataagcgcagtgtatttcgcaaaacattgccattccctgctctggcgcaatattcattcttattttcgcgttgattcacgaactgttaattacatattcacggtggcaaaaaatataaaaccacatttttagtggtagtttgtggcggtgaatttttccagacaaatacaaaaactggagttgccatgatgagcgaaagtaataagcaacaggcagtgaataagttgacagagattgtcgctaactttaccgccatgatttctacccgaatgcctgatgacgtggtggataaactaaaacagctaaaggatgccgaaacgtcgtcgatggggaaaattatctaccatacgatgttcgacaacatgcaaaaagcgattgacctgaatcgtcctgcctgtcaggacaccggggagattatgttcttcgttaaagtcggttcccgcttcccactgcttggcgagctgcaaagcatactcaaacaagccgtggaagaggcaaccgtcaaagcgccactacgtcacaatgcggtagaaatttttgacgaagtaaacaccggcaaaaataccggtagcggcgtaccgtgggtcacctgggacatcatccccgacaatgacgatgcggaaatcgaagtttacatggcaggcggcggctgcacgctacctggccgctcgaaagtgttaatgccgtcagaaggctacgaaggcgtggtgaaattcgtcttcgaaaatatctccaccctcgccgtaaacgcctgtccaccggtactggtgggcgtgggcatcgccacctcggtggaaaccgccgccgtactctcgcgtaaagccattttgcgcccgattggcagccgccatcccaatccaaaagcggcagaactggagctacgcctggaagaaggactcaaccgtctggggattggtccacaagggctgaccggcaacagttcagtgatgggcgtacatatcgaatctgccgcccgccatccgtcaaccatcggcgttgctgtctctaccggctgctgggcgcatcgtcgcggcacgctgctggttcatgccgatctcacctttgaaaatctgtctcacacccggagcgcgttatgaaaaagatcctgacaaccccgatcaaagctgaagatctgcaagatattcgcgtcggcgatgtgatctacctgaccggtacgctggtgacctgccgcgacgtttgtcaccgccgtttgatcgaactgaaacgtccgatcccttacgatctcaacggcaaagcgattttccacgctggccccatcgtgcgcaaaaacggcgacaaatgggagatggtctccgtcggcccgacaaccagtatgcgtatggaaagttttgaacgtgaatttattgagcagaccggcgtgaaactggtggttggcaaaggtggtatggggccgctgaccgaagaaggctgccagaaattcaaggcgctacatgtgattttcccggcaggctgcgcggtgctggcggcaacccaggtggaagagattgaagaagtgcactggacagagctcggaatgccggagtcactgtgggtctgccgggtcaaagagttcggcccgctgattgtctctattgatacccacggcaacaacctgatagccgaaaacaaaaagctgttcgccgaacgccgcgatcccatcgtggaagagatctgcgagcacgtccattacatcaaataaccctcccggagaggctcacccctctcctttttcgcaggcataacacgatgaaaccttccactgaatggtggcgatatcttgcgccgctggcggtcatcgccattattgctctacttccggttcccgcagggctggagaaccatacctggctctactttgccgtttttactggcgtgatcgttggactgatcctcgaacccgtgccgggtgccgtggtggcgatggtgggtatatccatcatcgccatactctctccctggctgctgttcagcccggagcagctcgctcagccaggctttaaattcactgcaaaatccctctcgtgggccgtttccggtttttctaattcggttatctggctgattttcgccgcctttatgtttggcacaggctatgaaaaaaccgggcttggacgccgcattgcgctgattctggtgaaaaagatgggacatcgcacgctgtttctcggctatgcggtgatgttctccgagctgatcctcgcacctgtaacaccgtccaactcggcgcgtggtgcggggattatctatcccatcatccgtaacctgccaccgctctatcaatcacaaccaaacgacagcagttcgcgcagcattggctcgtacatcatgtggatggggattgttgccgactgcgtgaccagcgccattttcttgacggcgatggcaccaaacttgctgttaattggactgatgaaaagcgcatctcacgccacgctgagttggggcgactggttcctcgggatgttgccgctcagcattttactggttctgctggttccctggctggcttacgtgctgtacccgccggtactgaagtctggcgatcaggtgccgcgctgggcagagacggaactgcaggcaatgggcccgctctgttcgcgtgaaaaacggatgctggggctgatggtaggcgcgctggtgctgtggattttcggcggtgattatatcgatgccgcgatggtcggttacagcgtggtggcactgatgctgcttctgcgcattatcagttgggacgacattgtcagtaataaagcggcgtggaacgttttcttctggctggcctcgcttatcaccctcgccaccggactcaacaacaccggttttattagctggtttggcaaactgttagcaggcagcttaagcggttattcgccaacgatggtgatggtggcgttgattgtggtgttttatctactgcgctactttttcgccagcgccacggcgtatacctccgctctcgcaccgatgatgattgctgctgcgctggcgatgccggaaatcccgctgccggtgttctgcctgatggttggtgcggcaattggtctggggagcattcttacaccatacgccaccggccccagtccgatttactacggcagtggttatctgccaacggcggattactggcgactgggggcgatttttgggctgatattcctcgtattgctggtgattaccggcttactgtggatgcccgtggtgttgctttaagtgaggacggtgccggaaattgctctccggcacccaatagttttacgcagccggtaactccgccagcggccagcgcggacgcacgctaacgccgagatccgccgtcgcgcctgctttaaaccgcaccattccggcataggcgatcatcgcgccgttatcagtacaaaattccggacgcgcgtagaacacttcgccgcggcgttttttcatcatttcagccagcttcgcccgtaacgtacggttagcactcacgccgcccgccatgaccagtcgcttaaagcccgtctgatccagcgcccgcttgcacttaatcatcagcgtatcgaccaccgcatcttcaaaggcgcgggcgatatcagcacgcgtctggtcgtcggtgccgttgtcacgaatggtatttgccgcgaaggttttcaggccggagaagctgaaatccagccccggacggtcggtcatcggacgcgggaagacaaagcgcccggcagtaccctgagccgccattttcgacagtaacggcccgccaggataatccagccccagcagcttcgcggttttatcaaacgcttccccggcggcatcatcgatagactcgccgagcagctcgtactgaccaatgccagtcacgctgattaactgcgtatgaccgccggaaacaagcagcgcaacaaacggaaattccggcgggttatcttccagcatcggcgctaacagatgcccttccatatggtgtacagggatcgccggaacgtcccaggcaaacgccagagaacgccccacggtcgcgccaaccagtagcgcgccgactaatccagggcctgcggtataggccacagcatcaatgtcttttgccgttaaaccagactcctttagcgccgcctggatcaacggtacggttttacgcacatgatcgcgggaggccagttcaggcacgacgccgccgtagtcagcgtgcaatttcacctgactatacaattggttggctaacaaacctttttcatcgtcgtaaatggcgatgccggtttcatcgcaggaagtttcaatacccagtacacgcatgacttgttttacctcgctttattaccgcgcagtgtaggaccaatgcgggttgatgtaaaactttgttcgcccctggagaaagcctcgtgtatactcctcacccttataaaagtccctttcaaaaaaggccgcggtgctttacaaagcagcagcaattgcagtaaaattccgcaccattttgaaataagctggcgttgatgccagcggcaaaccgaattaatcaaaggtgagaggcacatgccggtaattaaagtacgtgaaaacgagccgttcgacgtagctctgcgtcgcttcaagcgttcctgcgaaaaagcaggtgttctggcggaagttcgtcgtcgtgagttctatgaaaaaccgactaccgaacgtaagcgcgctaaagcttctgcagtgaaacgtcacgcgaagaaactggctcgcgaaaacgcacgccgcactcgtctgtactaattccccgagagcgttgctctccgatcagaccgagttgtagttgtaaggccgtgcttccgaaaggaatgcgcggcttattttcgtttatgaattgctaaaaatcggggcctatggctggacgaatcccacgcgtattcattaatgatctgctggcacgcactgacatcgtcgatctgatcgatgcccgtgtgaagctgaaaaagcagggcaagaatttccacgcgtgttgtccattccacaacgagaaaaccccgtccttcaccgttaacggtgagaaacagttttaccactgctttggatgtggcgcgcacggcaacgcgatcgacttcctgatgaactacgacaagctcgagttcgtcgaaacggtcgaagagctggcagcaatgcacaatcttgaagtgccatttgaagcaggcagcggccccagccagatcgagcgccatcagaggcaaacgctttatcagttgatggacggtctgaatacgttttaccaacaatctttacaacaacctgttgccacgtctgcgcgccagtatctggaaaaacgcggattaagccacgaggttatcgctcgctttgcgattggttttgcgccccccggctgggacaacgtcctgaagcggtttggcggcaatccagaaaatcgccagtcattgattgatgcggggatgttggtcactaacgatcagggacgcagttacgatcgtttccgcgagcgggtgatgttccccattcgcgataaacgcggtcgggtgattggttttggcgggcgcgtgctgggcaacgatacccccaaatacctgaactcgccggaaacagacattttccataaaggccgccagctttacggtctttatgaagcgcagcaggataacgctgaacccaatcgtctgcttgtggtcgaaggctatatggacgtggtggcgctggcgcaatacggcattaattacgccgttgcgtcgttaggtacgtcaaccaccgccgatcacatacaactgttgttccgcgcgaccaacaatgtcatttgctgttatgacggcgaccgtgcaggccgcgatgccgcctggcgagcgctggaaacggcgctgccttacatgacagacggccgtcagctacgctttatgtttttgcctgatggcgaagaccctgacacgctagtacgaaaagaaggtaaagaagcgtttgaagcgcggatggagcaggcgatgccactctccgcatttctgtttaacagtctgatgccgcaagttgatctgagtacccctgacgggcgcgcacgtttgagtacgctggcactaccattgatatcgcaagtgccgggcgaaacgctgcgaatatatcttcgtcaggaattaggcaacaaattaggcatacttgatgacagccagcttgaacgattaatgccaaaagcggcagagagcggcgtttctcgccctgttccgcagctaaaacgcacgaccatgcgtatacttatagggttgctggtgcaaaatccagaattagcgacgttggtcccgccgcttgagaatctggatgaaaataagctccctggacttggcttattcagagaactggtcaacacttgtctctcccagccaggtctgaccaccgggcaacttttagagcactatcgtggtacaaataatgctgccacccttgaaaaactgtcgatgtgggacgatatagcagataagaatattgctgagcaaaccttcaccgactcactcaaccatatgtttgattcgctgcttgaactgcgccaggaagagttaatcgctcgtgagcgcacgcatggtttaagcaacgaagaacgcctggagctctggacattaaaccaggagctggcgaaaaagtgatttaacggcttaagtgccgaagagcgatcgggaagcccccgacagccgcactgagaggcagcggcaaatatataagtacgccctcgtaattatcgttggcggtaaacaaccgttggatttcagcgttaacggctgaaggacatcgggtcaatcgcccaacaccaacctcatgaaataagtgtggataccgtcttatggagcaaaacccgcagtcacagctgaaacttcttgtcacccgtggtaaggagcaaggctatctgacctatgccgaggtcaatgaccatctgccggaagatatcgtcgattcagatcagatcgaagacatcatccaaatgatcaacgacatgggcattcaggtgatggaagaagcaccggatgccgatgatctgatgctggctgaaaacaccgcggacgaagatgctgccgaagccgccgcgcaggtgctttccagcgtggaatctgaaatcgggcgcacgactgacccggtacgcatgtacatgcgtgaaatgggcaccgttgaactgttgacccgcgaaggcgaaattgacatcgctaagcgtattgaagacgggatcaaccaggttcaatgctccgttgctgaatatccggaagcgatcacctatctgctggaacagtacgatcgtgttgaagcagaagaagcgcgtctgtccgatctgatcaccggctttgttgacccgaacgcagaagaagatctggcacctaccgccactcacgtcggttctgagctttcccaggaagatctggacgatgacgaagatgaagacgaagaagatggcgatgacgacagcgccgatgatgacaacagcatcgacccggaactggctcgcgaaaaatttgcggaactacgcgctcagtacgttgtaacgcgtgacaccatcaaagcgaaaggtcgcagtcacgctaccgctcaggaagagatcctgaaactgtctgaagtattcaaacagttccgcctggtgccgaagcagtttgactacctggtcaacagcatgcgcgtcatgatggaccgcgttcgtacgcaagaacgtctgatcatgaagctctgcgttgagcagtgcaaaatgccgaagaaaaacttcattaccctgtttaccggcaacgaaaccagcgatacctggttcaacgcggcaattgcgatgaacaagccgtggtcggaaaaactgcacgatgtctctgaagaagtgcatcgcgccctgcaaaaactgcagcagattgaagaagaaaccggcctgaccatcgagcaggttaaagatatcaaccgtcgtatgtccatcggtgaagcgaaagcccgccgtgcgaagaaagagatggttgaagcgaacttacgtctggttatttctatcgctaagaaatacaccaaccgtggcttgcagttccttgacctgattcaggaaggcaacatcggtctgatgaaagcggttgataaattcgaataccgccgtggttacaagttctccacctacgcaacctggtggatccgtcaggcgatcacccgctctatcgcggatcaggcgcgcaccatccgtattccggtgcatatgattgagaccatcaacaagctcaaccgtatttctcgccagatgctgcaagagatgggccgtgaaccgacgccggaagaactggctgaacgtatgctgatgccggaagacaagatccgcaaagtgctgaagatcgccaaagagccaatctccatggaaacgccgatcggtgatgatgaagattcgcatctgggggatttcatcgaggataccaccctcgagctgccgctggattctgcgaccaccgaaagcctgcgtgcggcaacgcacgacgtgctggctggcctgaccgcgcgtgaagcaaaagttctgcgtatgcgtttcggtatcgatatgaacaccgactacacgctggaagaagtgggtaaacagttcgacgttacccgcgaacgtatccgtcagatcgaagcgaaggcgctgcgcaaactgcgtcacccgagccgttctgaagtgctgcgtagcttcctggacgattaatcggtaggccggatcaggcgttacgccgcacccggcactaggccctctgcacaaacgccaccttttcggtggcgttttttatcgcccacgcactaccagcgcctggtccagctcgcgatacgcttcaaccagtttctccagtgaaacgcgacttaaaccgctgggatttggcagcacccaaatctgcgtcgaaccaatggtgagcgtttgtttcccccactgtgcaccgcgctggctgaatccctgttcatatgcttgtttgcccagaatcgccaacgcctgcggctgataatcttcaattttttcaatcagcttacgcccgcctgcgtgtagctcctgctttgaaacttcattggcttgcaccgttggacggtctaccagtttggtgacgccacaacgataatccagcagatgctgtgcctcctgcggcttcaactgacggtcggtaaacccggcctgatatatcaccttccagaagcgatttgccggatgagcaaagggaaaaccagtcccggcggatgaaagcccagggttgataccgcaaaacacgacccgtaaccctggagccaaaatatcctcaaccatatttactcctttctaacatcaccaggaaaagtataacggattgaaaatacattgtttataaaaacagcaggcgcgcggtaatggctggattgcgacacggagttactttataatccgctaccatggccccttagctcagtggttagagcaggcgactcataatcgcttggtcgctggttcaagtccagcaggggccaccagatatagcaaaggctgacgagaaatcgtcagcctttttctttttatatatcagttactttgcgtgccagtaagccgctgcacgtacccgctgtgggtcatactgttccgcttcaaagcggcggcttaaattcttaacgactttaccttcgccggttatccagatgaagtaatcatcggcagggatttgcatctgcgccagacgcgcatctaccgcctgctcatcatgtgccagccattcgatattaaaaccatcaaggtgcgcgagataatcctgacaggcgttatcccgcacgctaaccagcgcactaacttgcggtttaacggcaagtttgctcaacgtttccaggcggcggcgcaatgcaggcattccggattcatcgcagacatacagctgatacgcgtaatcttccggcaccaccagcgaaccgcgcggacctgccaccgtaagtttatcgcccggttgcgcctgcatcgcccagccgctggcgaccccaccgtcgtgaataaagaaatcaatcgccagttcatggcgtagttcgtcatacagcggcgtatagtcacgcgacggtgggcgtggtccttccggccagacgatgccctcttccgttaccgttggcggcacaaagtgagcgtcaggttgaggaaagaagagtttgctgtgatcgtcaaagccacgcgatgtaaaaccgtccagcgcctcgccgccgaggacaatgcgctgaaaaccggcgctgatgcgctcaacgcgtaacacagtcagttcacggaagcgcagatcattgcgaacgcgctgcgggtagcggggggtgttattcattgttatcgccttcgtgatggtaatcagatatatctaaataaaactcgcaaatgataatgattgttaatcatgataaatgcaagcgatttgtagaactgatatgtctatagtctgataagacgaaccgcctcttctcaggcatcattactcaacgccggatgcggcgtgaacgccttatccggcctacgtgtgagatgagtccacgtttaaaaatcatttttacacttgcaagaacgctcatatcagatataaattagatatatctaattaagcaaaaggaggctgatatgagccatcatcacgaagggtgttgtaaacatgaaggccagccacgccatgagggctgctgcaaaggtgagaagtcagaacacgagcactgcggacacggtcaccagcatgaacacggtcaatgctgcggtggtcgccacggtcgcggcggcggtcgtcggcaacgtttctttggtcacggtgaattacgtctggtgattctggatattctctcgcgcgatgacagccacggttacgaattgattaaagcgattgagaatctaacccaggggaattacaccccaagcccgggcgtcatctacccaacgctggattttctgcaggagcagtcgctgattaccatccgcgaagaggaaggaggtaagaagcagattgcgctgaccgaacaaggcgcgcagtggctggaagaaaaccgcgaacaggtggagatgattgaagaacgcatcaaagcgcgttgcgttggcgcggcgctgcgccagaacccgcaaatgaagcgggcgctggataattttaaagcggtgctggatttacgcgtcaaccagagcgatatcagtgatgcacaaataaaaaagatcattgcggtgatcgaccgcgccgcttttgatattacgcaactggattaatcgccgcatccgccagtggcgcggtgcaattgccggatgcgacgcttgacgcgccttatccggcctacacccgctacacaccccgcaggcctgataagatgcgccagcatcgcatcaggcattgtgctccaaccgccggatccggcataccgattaatgcagtaccgtcaccgcgtcttccagtcggctggcgcggtgtttcaccatcgccgacacctgcgcactctcttccaccagctcggcatttttctgggtgatcaggttaagctcatccactgcacgggtcaggctggaaagcccatcggcctgttccagcgttgaatggctaatctgggcgatcaactgggtgacgtttttcacctgtgccacaatatcttccatcgtccgtccggcggcgtgtacctgctgcgaaccggattgcaccttatcagcactggcatcaatcagcttgcgaatatcgttggcagcattagcgctgcggctggctaaatgacgcacttcccctgccaccactgcaaaacctttgccctgttcgccggcacgcgccgcttccaccgccgcattcagggccagaatattggtctgaaacgcaatatcgttaatcagcgaagtaatggtgccaatgcgctgggtactgtcggcgatatcgtccattgtcttgatcaccgtggtcatcgcctccccaccctgcactgccgcattactggcagtgattgacagtttatcggcagccgacgccgtggcagagttctgtttcaccgacgccgccatttggttcatggtcgccaccgtttgctgaacgttatcaactgtctgctgggtatgttcgttcagttcatcggtgcctttcgccagcgtctcactgccatttctgacactggacacctggcttgagacatcgttaattagccaacggcacatcaggccaagttgccctaccgcacgtaatgtcagccccagctcatcgctgcgattcagatgctcaacactattacgttctccggtcgccaccttcagtgcctgatgggcaacattttctatcgggcgcacaatctgccattcaaaacaggcgcttgccaacaataccactaacgcacagaggatatacgtcaccaccggggcagcaacaaaccaaagcatggccgccagcaagataaacatcagggtcatcactccacgcgcccgccagcgaagcggtaatgaaggcagtttacccagccagcctttacgcaccaccaggcctttatgaatacgcttactggtacgtccggcgttcaacgctttgtacagcggctccaccgccgcgatctcttcatccgtcgcccgggtacgaatcgacatatagccactgatttttccctcgcgcaccatcggtaccgcattggcccgcacccaataatggtcaccatttttgcggcgatttttcacgatgccgctccagggctccccttttttcagggtgaaccacatatccgcaaacgccgcttttggcatatccgggtgacgcaccatgttgtgcggctgcccttgtaactcttgcaaggtatagccgctcacctgcacaaaagtgtcattagcatgagtgatatagctttgcagatcggtagtggacatcagagtggtatcgtccgccagcggggtattttgctgggtgacatacggatgagaagacatgttcgcgtcctgtgcaggttatatggttgttaacttcttgtcagagtttatgtcggccccgctgcggttatctttaaccgattaatttgatttagatcgcaatttgcgatttaaacacaaatctaattccttgatttaaaatactttcactctgttactatacgaaaacgttaattatcttgcccaaaaatcaggcaattattgccctgaaaacgtgcatttgcgcagcaatcatcaaatccatacccgacaaaaaccgtgcaaaataacaacaaatgttaacagatagcattaaatattgcacaaatgataaccgaatttgtgtttatcccgattttcgcgatcgcagccggagtggcgcaatccctgcaatacttaaatcggtatcatgtgatacgcgagcctccggagcatattttgaacaggttaccttcgagcgcatcggctttagcgtgcagcgcccacgccctgaatctcattgagaagcgaacgctggatcatgaggagatgaaagcacttaaccgagaggtgattgaatacttcaaagagcatgtcaatccggggtttttagagtatcgcaaatctgttaccgccggcggggattacggagccgtagagtggcaagcgggaagtttaaatacgcttgtcgacacccagggccaggagtttatcgactgcctgggaggttttggaattttcaacgtggggcaccgtaatccagttgtggtttccgccgtacagaatcaacttgcgaaacaaccgctgcacagccaggagctgctcgatccgttacgggcgatgttggcgaaaacccttgctgcgctaacgcccggtaaactgaaatacagcttcttctgtaatagcggcaccgagtccgttgaagcagcgctgaagctggcgaaagcttaccagtcaccgcgcggcaagtttacttttattgccaccagcggcgcgttccacggtaaatcacttggcgcgctgtcggccacggcgaaatcgaccttccgcaaaccgtttatgccgttactgccgggcttccgtcatgtgccgtttggcaatatcgaagccatgcgcacggctcttaacgagtgcaaaaaaaccggtgatgatgtggctgcggtgatcctcgaaccgattcagggtgaaggtggcgtaattctgccgccgccgggctatctcaccgccgtacgtaagctatgcgatgagttcggcgcactgatgatcctcgatgaagtacaaacgggcatggggcgcacgggcaagatgttcgcctgcgagcatgagaacgtacagccggatatcctctgccttgccaaagcgctcggcggcggcgtgatgccgattggcgcgaccatcgccactgaagaggtgttttcagttctgttcgacaacccattcctgcataccaccacctttggcggcaacccgctggcctgtgcggcggcgctggcgaccatcaatgtgttgctggagcagaacttaccggctcaggctgagcaaaaaggcgatatgttgctggacggtttccgtcaactggcgcgggaatatcccgatctggtacaggaagcgcgtggtaaagggatgttgatggcgattgagtttgttgataacgaaatcggctataactttgccagcgagatgttccgccagcgcgtactggtggccggaacgctcaataacgccaaaacgatccgcattgaaccgccactgacactgaccattgaacagtgtgaactggtgatcaaagcggcgcgtaaggcgctggcggccatgcgagtaagtgtcgaagaagcgtaatatcaaatcggatggcgatacgacgtcgccatccgatctttttatacgacgcgtacgcccgcaggcatcatccgctccggcgttaacagcacgctttcactgccgtcatcggtttccgcacacaacagcatgcattccgacgtttcaccacgcattttcgctttttgcagattgcataagaccaccaccgttttccccatcagctcttcttcgctgtagtacggcaccaggctggtcacggtttgcagcgttttttgccccacatcaacctgtacgatgtacagcttgtcggcgttttcatggcgtttcacttccacaatctttccgacgcgcatttccagacgtgcaaaatcagcgtaagccacggtttccattgcttcctcccttagggtaaaattttactaaactatagcaaaagtttttctcaatcctgtaggctaaaaatggagaatgcaggcgtgatcacattcgtgagccgctgtgttaccgttacagcgtcaaagaaacgcgctttatttactgaaaacaggtgacccgataagcacttcctctacaatgggggcgcacatcagggaaagtaaaaaaggtaaacatggcaacactaaaagacatcgcaatcgaagctggcgtatccctggcgacagtatccagggtcttaaatgacgatccgacattgaatgtgaaagaagagacgaaacatcgcattctcgagatcgccgaaaagctggagtacaagaccagtagtgcccgtaaactccagacaggtgcagtcaaccaacaccatattctggctatctacagctaccagcaggagctggagatcaacgatccttactatctggcgatccgccacggcattgaaacccagtgcgaaaagctgggcatcgagctcaccaactgttatgaacacagcggcttaccagacattaaaaacgtcaccggtattttaattgtcggcaaacccacgcccgccctgcgcgccgctgccagcgcgttgaccgacaatatctgttttatcgactttcacgaacccggcagcggttacgatgcggtggatatcgatctggcacgcatcagtaaagaaatcatcgacttctatatcaaccagggcgttaatcgtattggttttattggcggtgaagatgagcctggcaaggcggatattcgtgaggtcgcctttgcggaatatggccgactgaaacaagtggtacgcgaagaggatatctggcgcggcggtttttccagttcgtcgggttatgaactggcaaaacaaatgctggcgcgggaagactatccgaaggcactgtttgttgcttccgattccattgctatcggcgtactgcgggcaattcatgaacgaggcctgaacatcccacaggatatttcgcttatcagcgttaacgatatccccaccgcgcgatttacctttccgccgctctccaccgtgcgcatccattccgagatgatgggaagtcagggcgttaacctggtgtatgaaaaagcccgcgatggtcgcgcgctgccgctgttagtcttcgttcccagcaaattaaaactgcgcggcacgacccgttaaatccccttacacactgtccggcaatcgtttttgccggacagtgctgccgtttattttcgtgatccagttaaagtaaatgcatttacctgctactttttagtaaaaattttactaaactccccagcaattacacaaactaccatcaccatgaatggttccgatttctctctaccgggaggccctatgaatcgctgggaaaacattcagctcacccacgaaaaccgacttgcgccgcgtgcgtactttttttcatatgattctgttgcgcaagcgcgtacctttgcccgcgaaaccagcagcctgtttctgcccttaagcggtcagtggaatttccacttttttgaccatccgctgcaagtaccagaagccttcacctctgagttaatggctgactgggggcatattaccgtccccgccatgtggcaaatggaaggtcacggcaaactgcaatataccgacgaaggttttccgttccccatcgatgtgccgtttgtccccagcgataacccaaccggtgcctatcaacgtattttcaccctcagcgacggctggcagggtaaacagacgctgattaaatttgacggcgtcgaaacctattttgaagtctatgttaacggtcagtatgtgggtttcagcaagggcagtcgcctgaccgcagagtttgacatcagcgcgatggttaaaaccggcgacaacctgttgtgtgtgcgcgtgatgcagtgggcggactctacctacgtggaagaccaggatatgtggtggtcagcggggatcttccgcgatgtttatctggtcggaaaacacctaacgcatattaacgatttcactgtgcgtaccgactttgacgaagcctattgcgatgccacgctttcctgcgaagtggtgctggaaaatctcgccgcctcccctgtcgtcacgacgctggaatataccctgtttgatggcgaacgcgtggtgcacagcagcgccattgatcatttggcaattgaaaaactgaccagcgccacgtttgcttttactgtcgaacagccgcagcaatggtcagcagaatccccttatctttaccatctggtcatgacgctgaaagacgccaacggcaacgttctggaagtggtgccacaacgcgttggcttccgtgatatcaaagtgcgcgacggtctgttctggatcaataaccgttatgtgatgctgcacggcgtcaaccgtcacgacaacgatcatcgcaaaggccgcgccgttggaatggatcgcgtcgagaaagatctccagttgatgaagcagcacaatatcaactccgtgcgtaccgctcactacccgaacgatccgcgtttttacgaactgtgtgatatctacggcctgtttgtgatggcggaaaccgacgtcgaatcgcacggctttgctaatgtcggcgatattagccgtattaccgacgatccgcagtgggaaaaagtctacgtcgagcgcattgttcgccatatccacgcgcagaaaaaccatccgtcgatcatcatctggtcgctgggcaatgaatccggctatggctgtaacatccgcgcgatgtaccatgcggcgaaagcgctggatgacacgcgactggtgcattacgaagaagatcgcgatgctgaagtggtcgatattatttccaccatgtacacccgcgtgccgctgatgaatgagtttggtgaatacccgcatccgaagccgcgcatcatctgtgaatatgctcatgcgatggggaacggaccgggcgggctgacggagtaccagaacgtcttctataagcacgattgcattcagggtcattatgtctgggagtggtgcgaccacgggatccaggcacaggacgaccacggcaatgtctggtataaattcggcggcgactacggcgactatcccaacaactataacttctgtcttgatggtttgatctattccgatcagacgccgggaccgggcctgaaagagtacaaacaggttatcgcgccggtaaaaatccacgcgcgggatctgactcgcggcgagttgaaagtcgaaaataaactgtggtttaccacgcttgatgactacaccctgcacgcagaggtgcgcgccgaaggtgaaacgctcgcgacgcagcagattaaactgcgcgacgttgcgccgaacagcgaagcccccttgcagatcacgctgccgcagctggacgcccgcgaagcgttcctcaacattacggtgaccaaagattcccgcacccgctacagcgaagccggacaccctatcgccacttatcagttcccgctgaaggaaaacaccgcgcagccagtgcctttcgcaccaaataatgcgcgtccgctgacgctggaagacgatcgtttgagctgcaccgttcgcggctacaacttcgcgatcaccttctcaaaaatgagtggcaaaccgacatcctggcaggtgaatggcgaatcgctgctgactcgcgagccaaagatcaacttcttcaagccgatgatcgacaaccacaagcaggagtacgaagggctgtggcaaccgaatcatttgcagatcatgcaggaacatctgcgcgactttgccgtagaacagagcgatggtgaagtgctgatcatcagccgcacagttattgccccgccggtgtttgacttcgggatgcgctgcacctacatctggcgcatcgctgccgatggccaggttaacgtggcgctttccggcgagcgttacggcgactatccgcacatcattccgtgcatcggtttcaccatgggaattaacggcgaatacgatcaggtggcgtattacggtcgtggaccgggcgaaaactacgccgacagccagcaggctaacatcatcgatatctggcgccaagccgtcgatgccatgttcgagaactatcccttcccgcagaacaacggtaaccgtcagcatgtccgctggacggcactgactaaccgccacggtaacggtctgctggtggttccgcagcgcccaattaacttcagcgcctggcactatacccaggaaaacatccacgctgcccagcactgtaacgagctgcagcgcagtgatgacatcaccctgaacctcgatcaccagctgcttggcctcggctccaactcctggggcagcgaggtgctggactcctggcgcgtctggttccgtgacttcagctacggctttacgttgctgccggtttctggcggagaagctaccgcgcaaagcctggcgtcgtatgagttcggcgcagggttcttttccacgaatttgcacagcgagaataagcaatgaggatcatcgataacttagaacagttccgccagatttacgcctctggcaagaagtggcaacgctgcgttgaagcgattgaaaatatcgacaacattcagcctggcgtcgcccactccatcggtgactcattgacttaccgcgtggagacagactccgcgaccgatgcgctatttaccgggcatcgacgctattttgaagtgcattactacctgcaagggcagcaaaaaattgaatatgcgccgaaagagacattacaggtagtggaatattatcgtgatgaaactgaccgtgaatatttaaaaggctgcggagaaaccgttgaggtccacgaagggcaaatcgttatttgcgatatccatgaagcgtatcggtttatctgcaataacgcggtcaaaaaagtggttctcaaagtcaccatcgaagatggttatttccataacaaataacaactacggcggcaaaaggagtttgccgccaccgctaccctactcattttcggagatgtgttatgtctgataccaaacgtaatacaatcggcaaattcggcttgctctcgctgacttttgccgccgtttacagctttaacaacgttatcaataataatattgagcttggactggcctcggcaccgatgtttttcctcgcgacgattttttattttattcccttctgtctgatcatcgcagaatttgtttcgttaaataaaaactcagaagccggtgtctacgcgtgggtaaaaagttcgctgggcggacgttgggcatttattactgcctatacctactggttcgtaaacctgttctttttcacctcactgttgccgcgcgttattgcttatgcttcgtatgccttcctcggatacgaatatattatgacgccggttgccaccaccattatcagtatggtgctgttcgccttctccacctgggtttccaccaacggggcgaaaatgttggggccaattacctccgtcacttcaacgctgatgctgctgttaacgctctcctacattttactggcaggtacggcgctggttggcggcgtacagcctgctgacgccatcaccgttgacgcgatgatcccgaacttcaactgggcgttcctcggcgttaccacctggatctttatggccgcaggtggcgcggagtccgtcgctgtgtacgttaacgacgtcaaaggcggttcgaaatcgttcgttaaagtgatcatcctcgccgggatttttatcggcgtactgtattccgtctcctcggtgctgattaacgtcttcgtcagcagcaaagagttgaaatttaccggcggatcggtgcaggtattccacggcatggcggcgtattttggtctaccggaagcgttgatgaatcgctttgtcggtctggtgtcctttaccgcgatgttcggttccctgctgatgtggaccgcaacgccggtgaaaattttcttctccgaaatcccggaaggcatctttggtaagaaaaccgtcgaactgaacgaaaacggcgttccggcgcggcgcagcgtggatccagttcctgatcgtcatcccgctgatgattatccgatgctcggttccaataccgtgcaggatctgatgaatactattattaatatgaccgccgcagcgtccatgcttccgccgttattcatcatgctggcttacctgaatttacgcgccaaattagatcacctgccacgcgatttccgtatgggctcccgccgcaccggtattatcgttgtttcaatgctgattgcgatatttgccgtagggtttgtcgcttcgacattcccgactggcgcgaatattctgaccatcattttttataacgtcggcggtattgttatcttccttggctttgcgtggtggaaatacagtaaatatataaagggattaacggctgaagagcgccatattgaagcgacgccagccagcaatgttgattaagcagaataataaaaaatgagcaggcattttccctcttcctggatgaggagagggaaaatagtttctgcctttatatttttataattacaacgataaaaggctgtactttttctttagctcatggattaacacaatgaaattaatcactgcaccatgcagagcattacttgctctgccgttttgctacgccttttctgcggcaggagaagaagcacgtccggcagaacatgacgacacaaaaacacccgcaattacctcgacatcttctccttcatttcgtttttacggcgaattaggggttggtggatatatggatttagagggtgagaataaacataaatacagcgacggtacctatattgaaggtggcctggagatgaagtacggctcctggttcggcctgatttacggcgaaggctggaccgtgcaggccgaccacgacggcaatgcctgggtgccagaccatagctggggtggtttcgagggcggaattaaccgtttctatggcggttatcgtaccaatgatggcaccgaaatcatgctcagtctgcgtcaggattcctcgctggatgacctgcaatggtggggcgatttcacccccgatctgggctacgtcattcccaatacccgcgacattatgactgcgctgaaggtacagaacttaagcggcaactttcgttatagcgtcaccgcgactcctgccggacatcatgatgaaagcaaagcctggctacattttggcaaatacgatcgctatgacgacaaatacacctatccggcaatgatgaacggttacatccagtatgaccttgccgaaggcatcacctggatgaacggtctggaaatcaccgacggcacaggacagctctatctcacgggcctgctaactcctaactttgccgctcgcgcctggcaccataccggacgcgccgacgggctggacgtaccgggaagtgaaagtgggatgatggtgagcgccatgtatgaagcgttaaagggcgtttatctctccaccgcttacacctacgccaaacatcgccctgaccacgctgacgatgaaaccacctctttcatgcagtttggtatctggtacgaatacggcggcggacgtttcgccacggcttttgatagccgcttctacatgaaaaatgcctctcacgatcccagcgaccaaatcttcctgatgcaatatttctactggtaataaggactgtaatttcatgaaaataaaaactattttaacgccagtaacctgcgctctgctgataagtttttccgcccatgccgctaacgccgacaattataaaaacgtgattaaccgtactggcgcgccgcagtacatgaaggattacgattacgacgatcaccagcgttttaatccgtttttcgatctcggagcctggcatggtcatctgttgccagacggccctaacaccatgggcggctttccgggcgttgcgctgctgacggaagagtacatcaactttatggccagcaatttcgaccgcctgaccgtctggcaggacggcaagaaagtcgactttacgctggaggcatacagtattcccggtgcgctggtgcaaaaactgacagcaaaagatgtgcaagtcgaaatgactctgcgcttcgccacgccgcgcacgtcactactggaaaccaaaatcaccagcaataaaccgctggatctggtgtgggacggcgaactgctggaaaaactggaagcgaaagaagggaaaccgctttccgataaaaccattgctggcgaataccctgactatcagcgcaaaatcagcgccacccgtgatggcctgaaagtcacctttggcaaagtgcgcgccacctgggatctgctgacctccggcgaatcggaatatcaggtgcataaatccctgccggtgcagactgaaatcaacggtaatcgctttaccagtaaggcgcatatcaacggttcgaccacgctctacaccacctattcccatctgctgaccgctcaggaagttagcaaagagcaaatgcagatccgcgatattctggcgcgtccggcgttttatctcaccgcctcgcagcaacgctgggaagaatacctgaagaaagggttaaccaatccggatgcgacgccggaacagacgcgcgtcgcggtgaaagcgatcgaaacgctcaacggtaactggcgctcaccgggcggtgcggtgaaatttaacaccgttacaccgtcggtgaccgggcgctggttctccggcaatcagacctggccgtgggatacctggaagcaggcgtttgcgatggcgcatttcaatccggacatcgccaaagagaatatccgcgcggtcttctcctggcagatccagcctggcgatagcgtgcgtccgcaggatgtgggctttgtccccgacctgatagcgtggaaccttagccccgagcgtggtggcgatggcggcaactggaacgaacgtaataccaaacccagccttgccgcctggtcggtgatggaagtgtataacgtcacccaagataaaacctgggtggcagagatgtacccgaaactggtggcctatcacgactggtggttacgtaaccgcgatcacaacggcaacggcgtgccggaatatggcgcgacccgcgacaaagcccacaacactgagagcggcgagatgctgtttacggtgaaaaaaggcgataaagaagagacgcagtctgggctgaacaactacgcccgcgtggtggagaaaggccagtacgacagtctggaaattccggcacaggttgctgcatcgtgggaatcggggcgtgatgatgccgccgtctttgggtttatcgacaaagaacagttggataaatatgtcgctaatggcggcaaacgtagcgactggacggtgaaattcgccgaaaaccgcagtcaggacggaacgttgctgggctactcgctattgcaggagtcggtggatcaggccagctatatgtacagcgataaccattatctggcggagatggcaaccatcctcggtaagccagaagaggccaaacgctatcgccagttggcacagcagctcgcggactacatcaacacctgtatgttcgacccgactacccagttctactatgacgtacgtattgaagataaaccactggcgaacggctgcgcgggcaaaccgattgttgagcgcggtaaagggccggaaggctggtcgccgctgtttaacggtgcggcaacgcaggccaatgccgacgcggtggtgaaggtgatgctcgatcctaaagagttcaacacctttgtcccgctgggaacggcggcgttaaccaatccggcttttggcgctgatatctactggcgtgggcgcgtatgggtggatcagttctggtttggtctgaaagggatggagcgttacggttatcgtgatgatgccctgaagctggcggatacgttcttccggcacgccaaagggttaaccgccgatggaccaattcaggaaaattacaacccgctgacaggcgcacagcaaggcgcaccaaatttctcctggagtgccgcgcatttgtatatgttgtataacgattttttccgtaagcaataatttgcaactgctggcggatgcggcgtaaacgccttatccgccctacatgtgcaatcctcctggccggataaaacgcggcaagcgttgcatccggcaactgcaccgcgccactggcggatgcggcgtgaacgccttatccgccctacatgtgtgttcccgtaggtcggataagacgcgacaagcgtcgcatccggcatctgcaccgcgccactggcggatgcggcgtggacgccttatccgccctacatgtgcaattccgtaacctggataaaacgcgacaagcgtcgcatccggcgttatcaccgggcgtattctttttgaatcccatcacaaaccccgcactccccttttcccttttctccggcgacggctaaattagaactcatccgaccacataacaattattttacatactggacaattttatgagctacccgtcgctgttcgccccgctggatttaggttttaccacgttaaaaaaccgcgtgttgatgggctcaatgcacaccgggctggaggaatacccggacggtgccgagcggctggcagcgttttatgccgaacgcgcccgtcacggcgtggcgctgattgtcagcggcggcattgcaccagatttaacaggcgttggcatggaaggtggcgcaatgctcaacgacgccagccagatcccacaccatcgcaccattaccgaagcggtacatcaggaaggcggcaaaatagccctgcaaattttgcataccgggcgctacagctaccaaccgcatctggtcgccccgtccgcattgcaggcccccatcaaccgtttcgtgccccatgagttaagccatgaagagatcctgcaactgatcgacaatttcgcccgctgcgcgcaactggcgcgggaggcaggatacgacggtgtagaggtgatgggttccgaagggtatttgatcaacgaatttctgacgctgcgcaccaatcagcgtagtgaccagtggggcggcgattaccgcaaccggatgcgatttgccgtagaagtagtgcgtgcggtgcgcgaacgcgtcggcaacgacttcattattatctaccgactgtcgatgctcgacctggtcgaagacggcgggacttttgccgaaacggtagagctggcgcaggccattgaagcggcgggcgcgaccattatcaacaccggcattggctggcatgaagcacgtattccgaccattgccacgcccgtgccgcgcggcgcatttagctgggtcacgcgcaaactgaaaggccacgtctcgctgccgctggtaaccaccaaccggattaacgatccgcaggttgccgacgatattctctcgcgcggcgatgccgatatggtatcgatggcgcgaccgtttcttgctgatgcggagctgctgtcaaaagcgcaatcgggacgagccgatgagatcaacacttgtattggctgcaatcaggcctgtctcgatcaaatcttcgttggcaaagtcacctcgtgcctggtgaatcctcgcgcctgccacgaaaccaaaatgccaatccttcccgccgtgcagaaaaaaaatctggcggtggtcggtgcgggacctgctgggctggcgtttgccattaacgcggcggcgcgtgggcatcaggtaacattgtttgacgctcatagcgagattggcgggcagtttaatatcgccaaacagatccccggcaaagaggagttttacgaaacgctgcgctattaccgccggatgatcgaagtgacgggcgtgacgctaaaactcaatcacaccgtgacggcggatcagttacaggctttcgatgaaacgatcctcgccagtgggatcgtgccgcgcactccgcccatcgacgggatcgatcatccgaaggtattgagttatctcgatgtactgcgcgacaaagcgccggttggcaacaaagttgccatcatcggttgtggcgggattggttttgatacggcgatgtatttaagtcagccgggcgaatccaccagccagaatatcgccgggttctgtaatgaatgggggatcgacagtagcctacaacaggctggtggcttaagcccgcagggaatgcagatcccccgtagcccacggcagattgtgatgctccagcgcaaagccagcaaaccaggacaggggttaggcaaaaccaccggctggatccatcgcaccaccctgctctcgcggggtgtgaaaatgatcccaggcgtaagttatcagaagattgacgatgacgggctgcatgtggtgatcaacggcgaaacgcaggtattagcagtggacaatgtggtgatctgcgcagggcaagagccaaaccgcgcgctggcgcaaccgctgattgatagcgggaaaacggtgcatttaattggcggctgcgatgtggctatggagctggacgcacgacgggcaattgcccagggaacacggctggcgctggagatttaaatcgttatttgaagcgccggatgcaacgcatccggcacgtcgcgttaatcaataaacaaggcgggagaaatgccgaatcgcgttgccaattttttagcgtgttccagcgttaatttcctcttcccgctcaaaacgcgtgacaccatagatttactgccaatttccggcagatcggaaagggttaaaccatattgatccataagggtacgaatcacggctataccgccaggcatggcttgagccatggcattaaattccgcaaattcgggcgctgattcttcccacgcggttattttggcacacaccagatccagcaaggggttttcaggatcgttgagcagcagatgatctaccagttccagcgcctgggtgtattgttcctcgttctgaatacccgccagaaaaggtgccacagcagttagcttttctcctgcttgcaagatgtcggcaatcgcaatcattttttccccttagtacgatgaacagcggtaaagaaatcgtattctttatgcgtcataacttcacgtatgtagcacttttgcgattcaaaaaagaccattgctacaacacgtaattcattgcccccaacattgaaaacataatgcttatccagatatttgaagttatccagagatgggaatactgcttttaatgactcaggttttttgaaatatcccttagcaatcgtgttccccagagccaccaactccgttttatgttgcgggtatttttccgcagcatctttcaatgctttttgagttatcaggtgcattcttcatcacgtccgttgacaaattggcaatatgataacatccgttgccagattggcaacggatgaatttatctgtgtgacggaagaataaacgtagaaaaacgctaaacaagagaatgtagacgatggtgacagggattttttgttttatggaagcgcgattccagaactgggcagacattgccggatgcgacgcttgccgcgtcttatccggcctggagtaacgtgctgaacgtaggccggataaggcgtttacgccgcatccggcaggtaactcccaatcttaccgacgacgtcccagcttcaccgctttcagtaccacaaatttattattcgtcgcaatagtggtgcagttgccgaaaatcttcttcagtttatggaagtaatccaggtgacggttggcaacgatatacagctcgccgttgattttcaggcagcggcgggcgtggtggaacatctcccaggcgacgttatcggtcagcgcatgttgttggtgaaacggcgggttgcagagcacagcattaaagcggaaaggctccacgccggagagcgcgttgttgatcataaactcgcagcgatccaacgcctctggcatgttggtttcaacgttcaaacggctggaagcaaccgccatcggcgattcatcgacaaacaccactttcgcctgcgggtttttatcaagcagcgtcagaccaataacgccattaccgcaaccgagatcgacaatctccccttcgagattctctggcagatgttgcataaagaagcgcgcgccgatatcaagcccggtgcgggagaagacattcgcatggttgtggatagtccagtcagtaccttccagcttccagctaacggtctgcggcgcatcggccagctgcggttcattgaaagtgcaattaatcaggcgcgcttttttccatgccagcgtggtggtggttgggccgagcactttttcgaacagttccagcgtggaagtgtgaatgtcacgggccttggcaccggcaataatacgtgtatccgacgtgaccactttgcgcagcgcacgcagttgctgttccagcaatgccagtgttttcggcactttgatcagcaccacacccggctgttgcgggtagtcggcggtgctgtcgagaaacttcacgctcgactcatcaatcccgttgaggcgtaaattctcgcgcgtcgccagttcactgatgtatgagtcgccaatgctgtacggcttatgttccgccagtgcgcagcttaacgcaccaaaggcatcattcaggatcaacaccgggccgcggatttctgtgtcgtccaactgttgcagcaaatattcatccgccgcttcccacgcctgtagcgggttaacgtcatccgtcgccggaaaacgttgtagtgtcagtgaacggaaaccgttgtctaagtggctcatcggccctcctgaatgataaaatttcgacattgcccctgaaaagggtgcgtgagtataccctttttctctttttcgtgggcggttatgagcaatcttacttatcttcagggttatcccgagcagctactttcccaggtgcgaacactgattaacgaacagcgtctgggcgatgtgctggcaaaacgctatccgggaacacacgactacgccaccgataaagccctctggcaatatactcaggatctgaaaaatcagtttctgcgtaatgccccgccgatcaataaagtgatgtatgacaataagatccatgtgctaaaaaacgcgctcgggttacataccgctgtttctcgtgtgcagggcggcaagctgaaagcaaaggtggagatccgcgtcgctaccgtgtttcgcaacgcgccggaaccgtttttgcgcatgatcgtggtgcacgagctggcgcacctgaaggagaaagagcataacaaagcgttttaccagttgtgttgtcatatggaaccccagtaccaccagcttgagttcgacacccgactgtggctaacgcagttgtcgcttgggcagaacaaaatctgaaaatgatgtcaggcgttatcttttctttctttagcgcctaaaatcgacctcccccctttcgttaaggataacgaccatgctgcgcgcatttgcccgccttcttctccgtatttgtttttctcgccggactctaaagattgcctgcttactgttacttgtggcaggagcgaccatccttatcgccgatcgcgtaatggtcaacgccagcaaacagctgacctggagcgatgtcaacgccgttccggcgcgtaacgtgggtttattgctgggggcgaggccgggtaatcgctactttacccgacgtattgataccgcagcagcgttgtaccacgccggaaaagtgaaatggctgctggtaagtggcgataacggacgtaaaaattacgatgaagcatcaggtatgcagcaggctttgatcgctaaaggcgtaccagcaaaagtgatcttctgcgactatgccggattctcaacgctggattcggtagtgcgtgccaaaaaggtttttggtgaaaaccatatcaccattatctcgcaagaatttcataatcaacgcgccatctggctggcaaaacagtacggcatcgacgctatcggttttaacgcgccagacctcaatatgaagcacggtttttatactcaactgcgggagaaactcgctcgtgtcagcgccgtgattgacgccaaaatcctccatcgccagccgaaatatctcgggccttcggtcatgattgggccgtttagtgagcatggctgtccggcgcagaaataatgcgtatctgcgcacgtcgaagatgaaaaaggcgtgctacattgacgacagaatccctttatggagtatccacgcgttatgatacgtttcgctgtgattggtacgaactggatcactcgccagttcgtcgaggccgcccatgagagcggtaaatacaagttaaccgccgtatattcccgcagccttgaacaggcccagcacttcgccaatgatttttctgtcgagcatctgtttacctcgctggaagcgatggcggaaagcgatgccattgacgcggtgtatattgccagcccgaattccctgcatttttcccagacacaacttttccttagccataaaattaatgtgatttgcgagaaaccgctggcgtcgaatctggcggaagtggatgccgccattgcctgtgcgcgggaaaatcaggtggtgctgtttgaggcatttaaaaccgcctgcctgccgaactttcatttgttgcgccaggcgctgccgaaagtcggcaaactgcggaaagtctttttcaactattgccagtattcctcgcggtatcaacgttacctggatggtgagaatcccaacacctttaatccggcattctctaacggttcaattatggatatcggtttttactgtctggcgtcggcggtggcgttatttggtgagccgaaaagcgtgcaggcaaccgccagtttgctggcaagcggcgttgacgcccagggcgtggtggtgatggattacggtgatttcagcgtcaccttgcagcactcaaaagtcagtgattctgtcctggcgagcgagattcagggcgaagcaggatcgctggtgattgaaaaactgtctgaatgccagaaagtgtgcttcgtgccgcgtggcagccaaatgcaggatctcacccagccgcagcatattaataccatgctctacgaagcagagctgttcgctaccctggtggatgagcatctggtggatcatccagggctggcggtcagtcgcatcaccgccaaactgctgaccgagatccgccgccagactggggtgatttttccggcagatagcgtaaaactataattgccaaagtaaaacagtgtaaaaggtatgtaacagaccattgactggctgaatggtctgtcatactttgttacctgcaaaggggagtaacttcattgccggtcgatcgtcattacgatgtgtgaaaaaacacatccggtcaccgggcaacccgaaaggaatacgcagacgtattccttttttgttgtaagtgagaccttgccggaaggcgaggtctatgcataaaaagcagcggctggacgtcttccgacgttggccgtttttttatgtgtaaggaacttctatgaatactgtcggcacgccgttgctatggggcggattcgctgttgttgtcgccattatgctggctatcgacctgttgttgcaggggcgtcgtggggcacatgccatgaccatgaaacaggctgcggcctggtcgctggtctgggtgacgctgtcgttactgtttaacgccgctttctggtggtatctggtgcaaaccgaaggtcgcgccgttgccgatccacaggcactggcctttctcacaggttatctgattgagaaatcgctggcggtcgataacgtctttgtctggctgatgttgttcagctatttctctgttccggcggcattacaacgccgcgtgctggtgtatggcgtgctcggggcgattgttctgcgtaccatcatgatcttcactggcagctggctaatttcgcagttcgactggatcctgtatatcttcggtgccttcctgctgtttaccggcgtgaagatggcgctcgcccatgaagatgaatcaggcattggcgacaagcgctggtgcgctggctacgcggttcatttgcgcatgaccgacaccatcgacaacgagcatttctttgtgcgtaagaatggattgctgtacgccacaccgctgatgctggtactgattctggtggaattgagcgacgtgattttcgccgtggatagcattccggctatcttcgccgtgaccactgacccgttcattgtgctgacctcaaacctgtttgcgatcctcggcctgcgtgcgatgtatttcctgctggcgggcgtagcagagcgtttctcgatgctcaaatatggcctggcggtgattctggtgtttatcggtatcaagatgctgattgtcgacttctaccatattccaatcgccgtctcgctgggcgtggtgtttggcattctggtgatgacgtttattatcaacgcctgggtgaattatcggcatgataagcagcggggtggataatttttaatctgcctaagccgtgtaccctgtcattaacatgagcaccgttttctcctctccttccagggagagggtcggggtgagggtaatttttcgcaccgatgctggcctgttcccctcaccctaaccctctccccaaacggggcgaggggactgaccgagtccttttttgatgttgtcatcagtctggaagccgcacgttggctttatttttatgtcaaagaaatgtaaccattaagtttcaaaatatgacctctctttaaaatccagcatttttcgcttcccgaagctgtaactttccttatactcgaccttgcaaacactttgttacatcctgaaagatgcgtcgacagaacgcaccagggatgtgcgacaacacaatgaaaggatcgaaaaatgactacgcaacgttcaccggggctattccggcgtctggctcatggcagcctggtaaaacaaatcctggtcggccttgttctggggattcttctggcatggatctcaaaacccgcggcggaagctgttggtctgttaggtactttgttcgtcggcgcactgaaagccgttgcccccatcctggtgttgatgctggtgatggcatctattgctaaccaccagcacgggcagaaaaccaatatccgccctattttgttcctctatctactgggcaccttctctgctgctctggccgcagtagtcttcagctttgccttcccttctaccctgcatttatccagtagcgcgggtgatatttcgccgccgtcaggcattgtcgaagtgatgcgcgggctggtaatgagcatggtttccaaccccatcgacgcgctgctgaaaggtaactacatcgggattctggtgtgggcgatcggcctcggcttcgcactgcgtcacggtaacgagaccaccaaaaacctggttaacgatatgtcgaatgccgttacctttatggtgaaactggtcattcgcttcgcaccgattggtatttttgggctggtttcttctaccctggcaaccaccggtttctccacactgtggggctacgcgcaactgctggtcgtgctggttggctgtatgttactggtggcgctggtggttaacccattgctggtgtggtggaaaattcgtcgtaacccgttcccgctggtgctgctgtgcctgcgcgaaagcggtgtgtatgccttcttcacccgcagctctgcagcgaacattccggtgaatatggcgctgtgtgaaaagctgaatctggatcgcgatacctattccgtttctattccgctgggagccaccatcaatatggcgggcgcagcaatcactattaccgtgttgacgctggctgcggttaatacgctgggtattccggtcgatctgcccacggcgctgctgttgagcgtggtggcttctctgtgtgcctgtggcgcatccggcgtggcgggggggtctctgctgctgatcccactggcctgtaatatgttcggtatttcgaacgatatcgccatgcaggtggttgccgtcggctttatcatcggcgtattgcaggactcttgcgaaaccgcgctgaactcttcaactgacgtgctgttcactgcggcagcttgccaggcagaagacgatcgtctggcaaatagcgccctgcgtaattaattgtttaacccctttcgtctacggcggaaggggttttctcaactttaaacggatcaattccccttttctgcatccgccagaaacgaatgatattcaggccattcataagcagaaaactaccctcaatcatcgtgccgcctatcgaccccgcccagaagttgtgaatcacccagcaacacgttgaaaaccacattacgcagcgcatggtcagccctttacagcagaatagcgcccaggtactgacaatcgtgccgataaccggcaatagttcgacaggatgatggaacttcgcgaggccaattccgccagtcagcacaataaaaatcgccattacccataagctgcgcgtgcgtaaggtaatcaatgtacgaatggcattaaggatggcactggcaccagcgggataggtgcccagaagaaaaaaatgtacgccaataacggcgctatagaccgaaagctgctttttgaagcgacgttcgtcacgattgaaaaatgttgtgataccaatcagaaaggcgatgacacccacgccctgggccagccaatacgcggtcatgataaatccttagcaggtatggaaaagcaaacggcgcttcacattatgaaacgccgttttttattaacaactcatttcgactttatagcgttacgccgcttttgaagatcgccagttcgcggaagtcgttacgctcgttacaggtttgcttaccgttggcaaactcaacgatggtgtcgataaattcttccagcaactgcggcatcgctttaccgtggatcaactgacccgcgtcaaagtcgatccagtgttttttcttcgccgccagttcactgttggtggcgattttcaccgtcggcacaaatccaccatacggcgtgccacgaccagtactgaacagcaccatatggcagcccgcacccgccagggcgctggtcgctacggcatcgttacccggcgcacttaacaagttcagccctggcgttttcagacgctcgccgtaacgcagcacgtcaaccacgacgctggaacccgctttctgggtacagccaagtgatttgtcttccagcgtggtgataccgcccgctttgttccccggcgatgggttttcatagatcggctgatcatgggcaataaagtactgtttgaagtcgttgaccatggtgaccagtttttcaaacgttgcttcgtcgcggcaatggtccatcagcaactgctctgcgccaaacatctccggcacttcggtcagtacggtagtaccgccgttagcaatcacgtagtcagagaaacgccccagcatcgggttagcagtaataccagaaagaccgtcagaaccaccgcactccagaccaaacttcagttcgctgagtttgcctggctcgcgtttatcgttgcgcatcacgttatacagctgatgcaaatgctcgattccggcttcgatctcatcatcctgctgttggcagatcatgaaatgaacgcgttcaggatcgatatcgcccagcgtttcacggaatgcggcaacctggttgttttcacagcccagaccaatcaccagcactgcgcctgcgttcgggtggcgcaccatgttttgcagcatggtgcgggtattaatgtgatcgtcgcccagctgtgagcagccgtaggtgtggctgaagaggaacacgccgtcagtaccttcggcgttgttggtctctttcagaaaacggttctggatctgccgcgcgatgccgttgacacagcccacggttggcaggatccacagctcattacgcaccccgacatcgccgttagcgcgacgatagatctgcacttcacgatctgccgcttgcgcaggcagatcctgaaaatcaggttgatagcgatactgatccagatcgctcagattcgtgcgcgtattgtgggcgtgaacgtgaacacctgccgcaatatccgccaatgcataaccaatcggcaggccatatttgatgacattggccccttttgcgatatccgttaacgcaaatttatgtccacgagcaacatcctggcgcagcgtaacagtctggttatcgacactgacttctgtgccttcagccaaatctgctaaagcgaccgcgacgttatccagcgcatggatcttgatgtattgcatatcaaccccagaccttagttcagttcaatggcgaagtagtcacgcgcattgttaaagcaaatatttttcaccatctcgcccagcaggttgatgtccgccggtgcttcgcccgcttccacccagcgaccgatcatctggcacagaatgcggcggaagtattcgtgacgggtgtatgacaggaagctacggctgtcagtcagcataccgacaaagcggctcagcagaccgagctgcgccagttgggtcatctgacgttccataccgtctttctgatcgttaaaccaccagccggaaccgaactgcattttgcccggcataccttcgccctggaagttaccgatcatggtgcccagcacttcgttatcgcgcgggttcaggcagtacagaatggttttcggcagcaggttttcttcattctgcttgctcagcaacttagacagctcttccgccatcggacggtcgttgatggagtcaaagcctacatccggccccagcagtttgaactgacgcaggttgttattacgcagcgcgccaatgtggtactgctgtacccagccgcgacgtgcatattcggcaccaaggaacaccagtaccgcagttttgaactgcgccacttcgtgctcgctcagggtttcgccagccagacggcgcgccagaatgctgtccagttccgcttcgttcgcttcagcaaacatcaccacatccagcgcgtggtcagacactttacagccgtgagcggcgaagtgatccagacgtttggtcagggcagtttgcaggtcagcaaagcggcgaatgtcggtatcggaaacttcgcccagcttcgccatgtagtcgttaaaggtcgcctgttcgatgttgaaggctttgtccggacgccagctcggcagcactttgatggtgaaagagccgtctttggcgatctctgcgtgatgctccagagaatcgatcgggtcatcggtggtgccgaccattttcacgttcatctgctgcatgatgccgcgcgcggagaagttatcctgcgccagcagttcgttacattcgttccagatttcatcggcagttgacggagaaagcaatttgccagtgataccaaacggacggcgcagttcgaggtgcgtccagtggtataacgggttgccgatagtgtgcggaacagtcgccgcccaggcgtcaaatttttcacggtcagacgcatcaccggtacacagacgctcggccacaccgttggtacgcatagcgcgccatttgtagtgatcgcctttcagccagatgtcatacaggtttttaaaacgatagtcttccgcaatctgctgcggcggcaaatggcaatggtaatcgaaaatcggctggtcttttgcgtagtcgtgatacagacggcgggcaaattcggtatctaacaggaaatcttcagtcataaacggagtcattttcgtcttcctctcaacgagtgagctagcttgcttatggtgcgatgctgacaaagttatcacaccaatttccagagtccgaagatattttcgtgagttagatcaataaacgtagttaaaaaaattactctcaaagtggtaaatctcgctgcaggccgcgccagtactggccttgctgtcgtcaggtaatgtccctacaaatattcccacatttgtgatggctctcaccttttaaagttgtatgacaagttatctttctgccgtcgcaaatcataagtcgacggaatgcaaattgccgattcattcatttgttagatgaatcgggttaaccggtacggaagccgaattagcacgaaactttcatggcaacgttcggggcgtgccggttttttttcggttacccggtcgtaactaacatcttcagcctctggcgggatgatggccgcgcttcctgcggatataacaaaacgatgaggttttacatgcgtaaaattaaagggttacgttggtatatgatcgcactggtgacgctcggcaccgtgcttggttacctgacgcgtaacactgtggcggcagctgcgccaactctgatggaagagttaaacatctccacccaacagtattcctatatcatcgcagcctattctgctgcttatacggtcatgcaaccggtagcaggttatgtactggatgtgctgggtacgaaaatcggttatgcaatgtttgctgtgctgtgggccgtgttctgtggtgcaaccgcgctggcaggtagctggggtggcctggctgttgctcgtggtgcggtcggtgccgcggaagcagcgatgatcccggcgggtctgaaagccagctccgaatggttcccggcgaaagagcgttccatcgcagtaggctactttaacgtaggttcttcgattggtgcgatgattgcgccgccgctggtggtatgggcaatcgtaatgcacagctggcagatggcatttatcatctccggtgcattgagctttatctgggcgatggcatggctgattttctataaacatccgcgcgaccagaagcatctgaccgatgaagaacgcgactatattattaatggtcaggaagcccagcaccaggtgagcacggcgaagaaaatgtccgttggtcagatcctgcgtaaccgtcagttctggggtatcgcgctgccgcgtttcctggcagaaccggcctggggtacttttaacgcgtggatcccgctgttcatgtttaaagtttacggctttaacctgaaagagatcgcgatgttcgcctggatgccgatgctgtttgctgacctcggttgtatcctcggtggttacctgccgccgctgttccagcgttggtttggtgtgaacctgatcgtttcccgtaagatggtcgtaacgctgggtgcagtgctgatgattggcccgggtatgatcggcctgttcaccaacccgtatgtcgcaattatgctgctgtgtatcggtggttttgcccaccaggcactgtctggcgcgctgattacgctctcttccgatgtgtttggtcgtaacgaagtggcaacggcaaacggtttaaccgggatgtccgcatggctggcaagtacgctgtttgcgctggttgtcggtgcactggctgacaccatcggcttcagcccgctgttcgcagttctggcagtgttcgacctgttaggtgcgctggttatctggaccgtgttgcagaacaaaccggcgattgaggtggcgcaggaaacacataacgatcccgcaccgcaacattaacgtttcgtgtaagttttagtttcccttcaaagccgccttctcaggcggctttttcatcactgcgagtagagctaaactcgcaaaagtggtataacaaatatagtctgccgtatcatgcctggagcgcatatggaaatcactgaaccacgccgtttgtatcaacaacttgccgctgacctgaaagagcgcatcgaacagggcgtctatctggtgggtgataaactgcctgcagaacgctttattgccgatgaaaagaacgtcagccgtacggtagttcgtgaagccatcatcatgctggaagttgaaggctatgtcgaagtgcgtaaaggttcaggtattcatgtggtttccaaccagccgcgccatcagcaggcggctgacaataatatggaattcgccaattacggtccgtttgagttgcttcaggctcgccagctcatcgaaagtaatattgccgaattcgcggcaactcaggtaacgaaacaggacatcatgaaactgatggccattcaggaacaggcgcgcggcgaacaatgcttccgtgattccgagtgggatttgcagttccacattcaggtcgctctggcgacgcagaactccgccctggcggctatcgtggaaaaaatgtggacccagcgtagtcataacccgtactggaaaaaactgcacgaacacattgattcccgtaccgtcgataactggtgtgatgaccacgatcaaatcctcaaggcgctgattcgcaaagatcctcatgctgctaagctggcaatgtggcagcatctggaaaacaccaagatcatgttatttaacgaaaccagcgacgacttcgagttcaatgccgaccgctatctattcgccgaaaacccggtggtgcatctcgatacagccaccagcggcagtaaatgaaattcctgtccgacaggcgctgcaatgcgcctgtttgtctcgtcggtaagcgaaaagtataaagtgtcagcctgtgtaaatcctctcgccaccctcccctgcattcagcaaaatcagactccacggacatgtaattttgataacgaacaacgttgacctttgttacaattagattcaatttgaatttatgtttttgaatgctttcttatctcacgatttaacagggaatagttcaggctgtgttgatgtatcaaacccgcagaacataccaaaacagcaataacattgcggtagtgcatcttttaaaaccagcgtggcgttaaccgattcaccaggaataatgaatggaacttttgacccaattgctgcaagccctgtgggcgcaggattttgaaaccctggccaatccatcgatgattggcatgttgtattttgtcttgtttgtaattttgttccttgaaaacggcttgcttccggcggcctttttaccgggcgacagtttactggtattggtcggcgtgttgattgcgaaaggcgcgatgggctatccgcaaacgattctgctgctgaccgttgccgccagcctcggctgctgggtcagctatattcaggggcgatggctgggcaatacccgcaccgtacaaaactggctatctcatttacccgcgcattatcatcaacgcgcacaccatctttttcataaacacggtttatcggcgctgttaattggtcgctttattgcgtttgtcagaacactgctgccgacgattgccgggttatcagggctgaataacgcgcgctttcagtttttcaactggatgagcggtctgctgtgggtattgatcctgacaactctgggttacatgctcggcaaaacgccggtatttttaaagtacgaggaccagctgatgtcatgcctgatgctgctcccggtggtgctgctggtgtttggcctggcaggttctctggtcgtgttatggaaaaagaaatatggaaatcgggggtaagggatgcaaatacctcgcatgtcgcttcgccagctagcctggtccggcgctgttttacttctggtcggcacgctgttgctggcctggtccgcggttcgccagcaagagtctacgctggcgattcgtgccgttcatcaaggcacaacgatgccagacggtttttcaatctggcatcaccttgacgctcatggcattcctttcaaaagtatcacccccaaaaacgacactctgttaattacatttgactccagcgaccagagcgccgccgcaaaagcggtcctcgacagaacattgccccatggctacatcattgcgcagcaggacaataacagtcaggctatgcagtggctgacccggttacgggataactctcatcgcttcggataacttcctgttatccgaaacatatcactcactttggtgatttcaccgtaactgtctatgattaatgaggcggtggttaacactaccgcttcgttgtctggacaatcgttcctttgtaataggtccgaatcacaatggaaggttcaagaatgaaataccgcatcgctttagctgtttctctctttgctcttagtgccggtagttatgccactaccctgtgtcaggaaaaggagcaaaatatccttaaggagatcagctatgccgaaaaacaccaaaaccagaatcgtattgacggtctgaataaagccctgagtgaagtccgggccaactgttcagatagccagctgcgtgccgatcatcagaagaaaatcgcaaagcagaaagatgaggtggcggaacgccagcaagatttagccgaggcgaagcaaaaaggcgatgccgataagattgccaaacgcgaacggaaactggcagaagcgcaggaagagctgaaaaagctggaagcgcgcgactactaactcacaatagtcactacttactcacctggagaaaactatgtcgaaagaacacactacggaacatctgcgtgctgagttgaaatccctttccgatacgctggaagaggtgcttagctcatctggcgagaagtcgaaagaagagttgagtaagattcgtagcaaagcggagcaggcactgaaacagagccgttatcgcctgggtgaaaccggtgatgccattgccaaacaaacccgtgtcgcggcggcgcgtgccgatgagtatgtgcgcgaaaatccgtggacgggcgtgggcattggcgctgcaatcggtgtagtgctcggcgttctgctgtcgcgtcgttaattatggcggacactcatcacgcacaagggcccggtaaaagcgttctgggcatcgggcagcgaattgtttctatcatggttgaaatggtagagacacgtctgcggctggcggtggtggagctggaagaggaaaaagcgaatctctttcaacttttactgatgctgggcctgacgatgcttttcgctgcatttggtcttatgagcctgatggtgctaattatttgggcggttgacccgcaatatcgcctgaatgcgatgattgccaccaccgtggtgttgctgctactggcactgattggcggtatctggacgctacgtaaatcgcgtaagtctacgttgctgcgccatacacgccatgagttagcaaacgatcggcagctgctcgaggaggagtcccgtgagcagtaaagtcgaacgtgaacgacgtaaggcgcaactgcttagccagatccagcaacaacggctggatctttccgccagtcgtcgtgaatggctggagacaacaggcgcttacgatcgtcgctggaatatgctgctaagtctgcgctcctgggcgctggttggcagtagcgtgatggcgatctggacgattcgccatcctaatatgctggtccgctgggccagacgcggttttggcgtatggagcgcctggcgtctggttaaaacgaccctcaagcagcaacagcttcgcggttaacttccctctggccggagccattccggccttatccctcaaattttttgaagatttttgacagttttccttgctaacaatcatcattcaccacgtttatgattctctccatcgacagcaacgacgctaataccgcgccattgcacaaaaaaacaatcagcagcctgagtggcgcagtggagagtatgatgaaaaaattagaagatgttggtgtactggtagcgcgcattttaatgccgattctgtttattaccgctggctggggaaaaattactggctacgcgggtacccaacaatatatggaagcaatgggcgtcccgggttttatgctgccactggtgattctgcttgagtttggtggtggtctggcaatcctgttcggtttcctgactcgcaccacagccctgtttactgcgggctttacgctgctgacggcatttttatttcacagcaactttgctgaaggcgtcaactcgctgatgttcatgaaaaacctgacaatttctggcggattcctgctgctggcaattaccggtccgggcgcgtatagcatcgaccgcctgctgaataaaaagtggtaagcacgcgctatacttaacgataaaaaacgaggaggaagctcctcgtttttgctattggaggagagaaaaatgggtcaactgattgacggcgtctggcatgacacctggtacgataccaaatctaccggcggtaaatttcaacgttcagcttccgcatttcgtaactggctcactgccgatggcgctcctggccccactggcacaggcggttttatcgcagagaaagatcgttatcatctctatgtttcactcgcctgcccgtgggcgcaccgcacgctgatcatgcgcaaactcaaaggactggaaccgtttatttccgtttccgtagtgaacccgctgatgctggaaaacggttggacctttgatgacagttttccgggagcaaccggagacacgctctatcaaaatgaatttctgtatcagctttatctccacgccgatccacactacagcggacgagttactgttcccgtgctgtgggacaaaaagaaccacaccatcgtcagcaacgaatcagcagaaatcatccgcatgttcaataccgcgtttgatgcgctgggcgcgaaagcgggtgattactaccctccagccctgcaaacaaaaattgacgaacttaacggctggatttatgacaccgttaacaacggcgtgtataaagctggttttgccaccagccaggaagcttacgacgaggcggtggcgaaagtgtttgaatcgctggcacgactggagcagattttaggccagcatcgttacctgaccggcaaccagctaaccgaagccgatattcgcctgtggactacgctggtgcgttttgatccggtgtatgtgacccacttcaagtgtgataagcaccgcatcagcgattacctgaatctgtacggttttctgcgcgatatctaccagatgccggggatcgccgaaacagtcaatttcgatcatatccgtaatcattacttccgcagccataagaccatcaaccctacggggattatttcaattggtccgtggcaggatctcgatgaaccgcatggacgagatgttcgcttcggttaaaaaaaggcaccttacgaggtgcctctgataattagctaagtgcatgttgttcatgtcggatgtggcatgaacgccttatctgacatacaaaacattgtacattcaatagattgcataacccgcgcagaccagataagcgtagcgcatctggcgattttgcgcttgtcatcagtcttagcgcgccttcacggcactttattaattccttgaacgaatatttactgccatttcattcacgtctattcttaatttgctgctttaaaaacaagtgattgagcaaaattgaggcaaaaatggactggtatctgaaagtactaaaaaattatgtcggtttccggggtcgtgcgcggcgcaaagagtactggatgtttattctggtcaacatcatctttacgttcgtgctggggctgctggataaaatgttaggctggcaacgcgctggtggcgaaggcatcctgacgacaatctacggtattctggtgtttttaccgtggtgggcggttcagttccgccgcctgcacgacaccgaccgctcggcgtggtgggcactgctattcttaatcccgtttatcggctggcttattatcatcgtctttaactgccaggcgggtacgccaggcgaaaaccgctttggaccagatccaaaactggaaccttaaaacaaatctgctcgccggatgtctgactcatccggcttttatcattatgttgatgaatgaataatttactaatgtttatttaaaatatttcaatgtcgttatataaattacctataaaaaataaccatgtatttatcttaaatatcaaaacctttataacatccgaaaaagaaagatacgaatagcatttacacaatacccggaatagactttcgtcacttttaattaaagggatgtttttatgcagtggtatttgtccgtattaaaaaattatgttggtttctctggtcgcgcacgtcgtaaagagtactggatgtttactctgattaacgccatcgtcggcgctattatcaatgtcattcaattgattttaggtctggagcttccatatctgtctatgctttatttgctggcaaccttccttcccgtccttgcgcttgctatccgtcgcttacacgataccgaccgttcaggtgcctgggccttgctcttttttgttccgtttattggctggctcgtgcttctggtttttttctgcacagaaggtacttctggcagcaatcgttacggaaacgatccgaagtttggttcaaattaatcttagaattggggcgatatttcgcccctttttattaacaataataaatattattttccgttaaaaagtttgggaatttcccgcagacaccaggatttcgcttcccccatactgtcacgacgccaggccataataatatcgatctcgctggtcgattccgggctgacgacacgcaaccgcccttccgcaatatctttttcgaccataggatacggcatcgtcgccacgccaagccccgccagtaatgcctgacgtttatcttcaatcgtgctcaccgttaagcgcggctgtttgtccagcagctgtacggtcaacaccgggcgctcacgagcggtatccgccaccgcaattccacgatatttcacacgcgtcacttcagataacggttccggctcctgatgaatcgggtgatcaggcgcggcaacgtagacgttcattaacgtatagagcttgcgcgagttgatctccgacgaggaacgaaaatgcatatccggcgcgataacaatatccgcccgcccctgctccagccgttcccacgcccccgccagcacttctgtgatgattgccagttgggtattggcttttgccgccagtttgtcgattaacgggaaaaaggcaggtgtcggtaccagcgcttcggtcacaatggtgagatgcgtttcccaaccgcgcgcgagagcttccgcatcagtagtcagtttatctgcggcttccagcaaaacgcgccctcgctccaacaacatcctcccgacattggtgaatttggtacgatggcccgagcggtcaaacagcaccacatccagctcttcttccagtttttgcatggtgtagctaagtgcggaaggcacgcgtcccagctcatccgccgccgccgcaaaactgccccggcgatcgatcgcatccataacccgtagtgcttccagcgttaatgccctttctttggccatttcgttctcattcaggaaatttgaacataccgggcagaatatctggctaacaatgtagcgtccagccccttaccataaaaggaagtaaagagaggtcaagaattatgattactacccgaactgccaggcagtgtggacaagcagactacggatggttgcaggcccggtatactttttcctttggacactacttcgacccgaaattgttaggctatgcctccctgcgtgtgcttaaccaggaagtgctggccccaggtgccgcctttcagccgcgaacctatcccaaagtcgatattttaaatgtgattctggatggagaagcagagtatcgcgatagcgaaggcaatcatgttcaggccagcgccggagaggcgttgctgctctctacccagccgggtgtcagctatagcgaacacaatctcagcaaagacaaaccgttaacgcgaatgcagctttggctggacgcctgcccgcagcgagagaatccgctgattcaaaagctggcgcttaatatgggcaagcagcaattaatcgcctcgccagagggtgcgatgggaagcctgcaattacgccagcaagtgtggctgcaccatatcgtgctcgacaaaggcgaaagtgcgaatttccagttgcatgggccacgcgcgtatttgcaatcgattcacgggaaatttcatgcgcttacgcatcatgaagagaaagcggcgctgacctgcggtgatggggcgtttattcgtgacgaggctaacattacgctggttgccgattccccactgcgcgctttgctgatagatttgcctgtctagttgtttttacagggagatgatgatgagtaaaaaattggccaaaaagcgccagccggtgaagcccgtggtggcgaaagaacctgctcgcaccgccaaaaattttggctatgaagagatgttgagcgagctggaagctatcgtcgcggatgctgaaacgcgtttagccgaggatgaagctaccgcgtaaagacaggttgccggatgcggcgaaaacgccttatccggcctacaaaatccaacaacattaacgaattaaacaacccgtaggccggacaagatgcgccagcatcgcatccggcacgatccccaaaacctggcgtttatctggccttgctcgccataatctcgataatctgccgatccgtttgctgcatcgaatggcttgctaacgcacacaggttggcaatcgactgctcaacatcatgcgccacaatcccttcattgccggtcacggcggtatcatccagcgccattaacaccgctttccacgcagccgaagcactggtcgaaaccttcatcgcgcagctgttcgacgcaccatcgcaaatcatgccgctgacatcgccgatcatactgctgatcgccatcgagatggtttcataacgcccatccaccagccatgccatcccggcggcggcccccattgctgcggtcgttgcggcacacagcgcagacaaacgcggtaactggttatggatgtaaattgcgctcaaatgcgaaagcatcagcgcacgcgccagccgttcatcatccgctccgaagtgttctgctaccaccaccacaggcattgttgcggtaatcccctggttacccgagccggagttactcatagccggaagcgtagcgccgcccatacgcgcatcggatgccgcgctggtacgaatcacaatggatgaagagagatctttcgccagcaaaccgcgctcgcactgtttttccagcgtcgcgccaatatgcagcccccacttaccgctcaaaccttcctgcgataacgcacaatttagcttcgcggaatcgagaataaagcggatcgccgcaaacgggacttcattgacgaacttcaggatctcagccagcgtcggttctggaaagcaccgtcagcggagactcttgctcgccctctgccacacacgcctgctgggtaaacaccacaccatcgtgcgtctcgatatgcacaatgttggtatgcccgccgacgatggtgacacacgcccacttctcaccgttccagactttggcgcgtgagaagaggatttcatcgcaaggttcctggatcttaacggagactttccccgccgccagcagtgctttggcatcggcaattgcctgcgctgttgcgtctttcagcacttccagcccggcgttggcatttccacctaacgcccccagcgccgccgcaatcggcagccccaccattcccgtgccgggaacggtgacgcccagaccgttcttcatcagatttggcgaaacccaggcttctacacgttcaaccggaccttccagttctgccgcagcaaccgccgccgccagcgccagtgaaatcggttcagtacatcccagcgccggttttacttcctcctgaacggcgaggatgtaacgctgccataacggatttaaagtcgaatcaaacatattaaaaaccttaaaatttcaggtaaatcaagaaaatgccaggaacggagaaacacacagcaacaaaccagtgacgataatcaggtacagagacatccctttgtatttgtgcaatgctggtactttgtaaaccagccacgccgggatcaggcaccctaccatgccgaaaatcgggctacagatagaggtgaagctcaacaccggtgcgttcagtacgatggcgctccaggccagcaaaatggcgaaaatcatgatgccgcgctgaacgagattttcgttaatcttctcggcaggcatcttgcgacgcaggatgttcattacgatcccttgcgttgcttcgcgaaagcctaaatagacgccaaagaatgcagtcatgacagcaaagatattgagaatgacgctgaccactttcacccacgctgcgccgtcaccgctaataaactgtgcggcaatcgccagcgcggaaatattctgctcataggcttttaccgcttcgtcatgtcccatcgccagcgtgaacgacacggcgtagaaaaagacggtgacaaacaaaatgccaaacgcgatattcattgcccgcaatgctttatgccgcgccacttcaattgatttttcccgcgagcgataagagatcaccatcggacttaacgtctggataaacagaatcgacgtcagggtaaacggcagcgtaataatggcgtttttcaccagcagccccagcggcggtagcgaaccgacgttatacagatgccacattcccaccatcgacacgcccagcgccgcgaccaccagcagcttggtcagcaccatgccggtcgaaattttgaataacaatttctcgccgcgtgaggagatcgccaccagaatgcaaatcagtaccagaccataaaagggactgtctgacagcaacccttccgtcacgccgaaggtatgcaggtaggaagcactatcgttggtgatggcggtggaatagacgaacatccaaatcaccagcattacgaaatagagcgcacctaacaggatgccccagtttttacctaaataaccgctaatgacgctcgggtaatctttacattctggtgattctgccagcgtattaataaacaatcgctgaaacagatacattgccgggtaaccaatcaccgatgagagcaaaaatacccacaatcccatcaaaccgacctgcaccgggagaaaaacaatccccgcgccaatcgccatcccgatactcataatcacccagccggtgtcagtactgtcgaatttgatcgcttctcgccactcgctctcactcattccaggcacgacccgccggggtcgaaggcgtctgcaatgacgcctttattcgatgcaatttccataatttctcgctcaatattttgtagggcttattatttttttccgagccgcatcaaggcgatatgcggtctacgtttttgcaggcgagttattagaataaagaaatgatacgcgcgaggtcagagaaaatcttcacaatcaagactttgaaataacggagatggataagaattttctactaaattaatcgcaggagaatattcattctctatttgcggcagatcacaaaaaaaaggtgcacatttgtgcacccaaggatgaaagctgacagcaatgtcagccgcagaccactttaatggccagtcctccgcgtgatgtttcgcggtatttatcgttcatatctttgccggtttcatacatcgtctcgatcactttatcgagtgaaacacgcggtgccgaggtgcggcgcatcgccatccgcgcggcgtttactgctttcacggcattaatggcattacgttcaatgcacgggatttgtacctgtccggcaaccggatcgcaggtcagcccaaggttatgctccatcgcgatttccgccgcattgcatacctgcgccggactgccgcccagtagttcagttaaccctgccgccgccattgaacaggccacgccaatctccccctgacagccgacttccgcgccagagatggaggcgttcattttatacagcgcgccaatagcccccgcggccagaaaatagcgggcaattgaccgctcgtttaccggacgacggaacttatcgtaataagccagtactgccggaataatgccgcacgcaccgttagtcggtgccgttaccacgcgcccgccagctgcgttttcttcactaaccgccagcgcgtacatgttgatccagtcgatgacattcatcggatcgttagagatgttatcgctggaaaccagctgacgacgcagcgctacggcacggcgcggcacattgagcggaccaggcagcacgccttcagtgttcatcccacgttcaataccgtcatgcatcacttgccagatacgggcaaaaccggcgtcaatttccgctttgctgcgcagcgctagctcgttgtgcatcatcagaccagatatagacaggccgttgtaatcacacattttcagcagttcacctgctgagtggaaatcgtaaggtacggacgtttcgacatcgtgcgacaggccgaagtgttcttcttcgacaataaacccgccgccgacagagtaataggttttacttaatagctcttcctgtccttccaggcagtgatccgcattccgttctcatggcgaggcaacatttcgggatggaagataatgttctttgctacaggaaaatcaacaatatgcgcaccagatgccactggcagccgcccgctgcgcgttactaactctataaatgcagggatctcatcaatgacaacatcctgcggactgtttcctgccagtcccatgatgatggcgacatccgtggcatggcctttgcccgtcagtgacaacgacccgtacagatcgaccacaatatggctcgtcgcggttaataagccgctactttccagccgatcaataaaactttttccggcattcattggccccacggtatgcgaactggagggaccaatcccaattttgaaaatatcgaatgcactaatcatatccacaccctcggattgccgttcagtgaagtggagcggaacgaccttacgaccgtcccgctcacgaggctttacgcactacgtactgcgatggcttcaatttccagcttcacatctttcggcaaacgcgcgacctgcacacagctccgggtcggataggtcgcctgatgctcatcgaagaactgcttatagacttcgttgatggtggcaaaatcattcagatcggtgataaacacggtcatcttgatgatatcgcccacgctcagcccggcagcaaccacgatcgctttgacgttttcgaggcttaaacgcgcctgatcttgcacatcagccgggatctcaccggtctgtgggcaaaccggtatttgcccggaggtgaagaccatgctgcctaaatcaacgccctgaacataagggccgattgcgcctggggcacgttgcgtttcgataatctttttcatacatcctccggcgtcagagcgcctgggtaaaggtacgtgaaataacatcctgttgctgttcacgggtcagtgcgttgaagcgcacgcgtagccagagacacggattgtcaggttaggatatttttccgggtgctcgatggcatccagcagcatttcccgattcattacgttgacgttgaggtgttgaccgccttcgacatccgcttcgtggtggaaatacccatccagcaggccgacaaggttggttttacgtactggatcttctttgcccagcgccgcaggaacgattgagaaggtgtacgagatcccatctttggcgtaggtgaacggcagtttcgccaccgacgtcaatgaggccacggcacctttgcggtcacgaccatgcatcgggttagcgcccggcgcgaacggtgttccggcgcgacgaccgtccggcgtattaccggttttctggccgtacaccacgttagaagtgatagtcagaatcgactgggtagggacggcgttgcgataggttggcagcgctttaattttcttcataaagcgttcaaccaggtcgcaggcaatgctgtctacgcgctcgtcgttgttgccgtactgcggatattcaccgtcgatttcaaagtccaccgccaggccgttttcgtcacggattggtttcacgcgggcatatttgatggcagacagggagtccgtcgccaccgacaggcccgcgatgccgcatgccatagtgcgatagacatcacgatcgtgcagcgccatcagcgaagcttcgtagctgtacttgtcgtgcatgtagtgaatgatattcagcgcgctgatgtactgcaccgccagccagtccatgaagtgatcgaggctgtccatcactttgtcgtaatccagcacgtcgtccatcagcggtgctgttttcggcccgacctgaatcttcagcttctcgtccaccccgccgttaattgcgtagagcagcgttttcgccaggttagcgcgtgcaccaaagaactgcatttgcttaccaatcaccattgggctgacgcagcaggcaatcgcgtaatcgtcgctgttgaagtcagtacgcatcagatcgtcattttcatactgcaaggaagaggtgacgatcgacacctgcgcggcatattttttgaaggcaatcggtaattcttccgaccaaagaatggtcaggttaggttccggtgccggccccatagtgtgcagggtgtgcaaatagcggaaggagtttttggtcaccagcgtacgaccgtccagccccatcccgccgatcacttccgtcgcccagattgggtcgccggagaacagcgaatcaaattccggtgtacgcaggaagcgtaccatacggatcttcatgatgaagtgatcgatcagttcctgtgcctgctgctcattgagtacgccagctttaaagtcgcgctcaatgtagatatcgaggaacgatgccgtgcggcccagcgacatcgcgccgccattttgcgatttcactgccgccagataagcgaagtagagccactgcaccgcttcctgcgcattctgcgccgggcgagagatatcaaagccatatttcgccgccatttcctgaatctgcaacagcgcatgacgatgctctgccagctcctcacgcagacggatggtggcttccagatcctcgcctttttccagacgagactggagatcggcaaattgcagttcgcgttcacgtaccagataactgatgccatacagcgctacgcggcgatagtcaccgataatgcgcccacggccatagccatctggtaaaccggtcagcacgccagatttacggcagcgcagcatatccggtgagtaaacatcaaatacgccctggttatgggttttacgcagatcggtaaacagatattcaaattcactgtccatttctcggccataggcgtggaatgaacttttaatcatattaatgccaccgaacgggtgtagcgcacgtttcaacggcgcatccgtttgcaggccaacaattttttccagcggctggttaatatatcccgcatcatgagcggtaattgtggtggcaatattggtatcgaaatcaaccggcgcgtgggttgcattttcgatacggatgccttccattactttttcccacaattccgtggtggcaggcgtcgcttcggcgaggaaagattcatcgccttcatacggtgtatagttatgttgaataaaatcgcggacattaatttcgtttttccagtccgtacctttaaagccaagccatgcgtcggcgtacagcttatcgctggtatcaatatctaccttcatgaaaaataatctctctacaatacttcaactaaattatgcaaattctgcgggcgcgttaactttgcctaaatgaatggcatccaaagcaatcattttttcttcgttagtcggaataacggcacaaatgacacgcgcattttcactggaaacaattcgctcaccacaggagttagagcgattattcatttctgtatcaatctctaagcctaatacagccaaatgttccatgaccagacgacgaattaagcttgaattctctcctattccgccggtgaatataattccatccaggcgacgtaatgaagctgcgtgtccggcaatatgacgggcaattcggtgaacaaaggttttaattgccagttgcgcgcgttcgtgaccttcatgccaggctttttccagaacacgtaaatccgaagaaagaccggaaatacctaataatcccgactctttattcactacgcgttccaggtcacccaggctctggttggtttggctggcgacccaggacatcgcaccaaagtcgacatcgccactgcgggtacccatcatcaagccttccagcggcgtcattcccattgaggtatcaacactctgaccgttgcgaaccgcgcagattgacgcgccattgccaagatgcgccacaaccaggccggagtcatcttccgccagattcagcagcgaatgtgcgcgctgggaaacatagcggtgcgacgtgccgtggaaaccataacggcgtacacctaactcttcataatatttccacggcaggccgtataaataagcttccggagccatcgtctggtggaaactggtatcaaataccgccacctgagttacgcccggaaataattgctgcgccgattcaataccacttaaattggcgtaattatgcaggggtgccagtggagaaacgcgacggatattatcaatgacttcatcggtaataatggcggactcggtaaaaatactgccgccgtgagcgatgcggtggccaattaaggccacactgtcatttaaattccgtttttccagttcaaatgcaattgccttcaatgcaccttcgtagctgtggtgagccagcggtgctggctctcccccatttacggataagaatgcattttccgagttaataccgtcggcaatacctgacattaatacttcacagtcgctggcatcgagcacggaaaacttaatcgaagacgaaccacagttaataaccaaaacaaccggaaattcattcatctcttttctcatcctgagttacggattaaaacagtttgtatacgatgttcaggatggtcagcagaccaatcacggtaacaaacacgttatccagacgaccacggtatttcgccagagacggcgctttacggatggcatacatcggcaacaggcacagcagggatgcgataatcggtgcgcccatggcttcaatcaggtcaaggatgttcgggttggcgtaggcaacaacccaggtggagcccatgatgaagatcatgctgatagtgttcagtttacccagcgacactttagttttgtcgcctttataaccaaacttcaggaccaggccattcagaccttccagcgttcccagatagtgaccgaagaaagatttgaagatagccacgagtgcgatgatggaagccgcatattccagtgtaatcgcgaacgttgttttggtaccggtcatggacgcaaagtggttagccagataagaaagcactggaatattctgcgctttggcttccgccatgttggccggagacagagtaaacaggcagctaaaggcaaagaacatcaccactgcaaccatcagcatgctggcacgagaaatgatttgggaacatttacgttcggtgaagtcgcgaccgaagtctttctcatactcttcacgcttagaaaccacgaaggaagagacgattggcgagaagttaaaggagaaaaccatgatggaaatccccagccagacagtgatcaggataccgtcatgaccggttaacgacagcgaaccgaggtcaacctggtcgataactgcagagttccagtaagggatcagcgacaaagaaatcagcaccaggctggcgataaacggccataccaggtagctcatcactttaaccatcagatccttaccaaaccagatgacgaaagccatcagcagcaacaggaacagcgccacaaagccgcgattcagcggtgcaaagccgagctggttttcccagaacgtcataaaggtattggtaatagtaacgccataaatccacagcagtgggcaaatcgcgaagaagtacaggaacgtgataaccacgccgccagttttaccaaaatgctcttccaccgtttccgtaatgttgccggaagggttagagccagaaagacacagacgcgccagcgcccggtggcaataaaacgcgatggggtatgccaataccaacatcagaagaatcgggatcagtccgccaaaacctgcgcggatagggaagaacagcaccccggcgccgattgccgtaccaaacaagcctaacgtccatgtggtatctgatttacgccaggacgattgttttgtctggctggatacaatgctatctgaagtactcatatcctatcctcaacgaattaattaagcgtcaacgaaaccggtgatttgagagacgcgagaaagatcgatattgccgccggaaataatactgacggtttttctgttttgaatatattggtctaatttaccgcttaataatgcagcacatgccagagcgcctgcgccttcggtgacgactttattgcgctgaattaaggcaatcatactgtttctgatttcgtcttcgctgaccagcacgatgtcatcgactaattcacgaacgatttcgtaagttaaattacccgggcgggagacatcacaaccatccgccagggtgccggtagttcggtgcgtggttatttctccggagtggaaagaagccgccatgccgtgaacgttttcagactgtacgccaataacacgaatggtcgggttaatagatttaattgccaccgcaataccagcaattaaaccgccaccaccaattggcacaatcacgttatcgacatcatagagatcttccataatttccagaccaatcgttccctggccagcaatcactttcggatcatcgtaaggtgggataaaaatacggccttccatttcgacaatttcgctcactttagcgatagtgtcgttgaagttatcaccatgcagaacgacttctgcggagtagtcgcacgttgccgctactttggattttggcgcaccttttggcatcaccactttaccgtcgatacccagcatcgcgcaggagagggaaaccccttgcgcatggttgcccgcagaacaggccaccacgcctttgcgtttttccgcatcggtcagtgaacttaatttattaaatgcgccacgaattttaaatgaacccgtacgctgcatattttcaaacttcaggaatatttcacctttgcaacgttcactaaaatagttggagcgaggcatgcctgttttataaattcgcccagccagtcgttgtttcgcttcaataatgtcatcaatagcaaccggcagatcgtatgtaatatgcattataaaacctcttcgcctgaattaaatatgtaggtaaccgtaaccgacacctgcaagacagacaggtggattatttatgtttaaataaaaacaaataactaaccaacttctattaattgccttcgtctacacccattataagatgaatactctttggctaattccaccaaaaccgatgctgcttttttaatacgataatttttcgaccataccgcggcatattgtgccacaggtaatgtttcttcaaccggaatagtaataaattgattagaaccaaaaggtgacgtcatatcacaaggaattacagttaagaaatcagcattgagaacaagattataaattgtcacgactgagtcggttttaacgatgttttcaatactgatgccatttctttgtaacgtagtaagcagttcgctgtagtaccccatattagtttgtggcaacacccactgttcgttcttcaacgactccagcgtggtggtgccggtgcatgttcgggacttactggctaccagcacaaactcggactcgaacagcggctcaacatgtaaatcctgaagcttcatttctgcacttaacgtaccaatcgcaaaatccagtcgaccgtcgcggattgccggtaagaacgaagacagttgcgcttcatacatagaaacctgcgctttcgggaacacctctttgaacttgttgatcatccctgacataaaagtaaaaccaatcaatgaaggaaaaccaaatgagacttccaccaccgcctcagaagacataccgcttatctcattaaccatatttttcatttcacgggtaatggattcggaacgggagagtaacaattgaccggcaggtgttaatgttacaccggtatttttccgcaccactaattccacaccaaaataatcttcaatatcgttaatgattttactgacggccggttgagttaaccctaattcttttgcagccgagccgatagaaccacttctaatgacttcctgaaagactaccaggtgctgcgttttcggaagaagaatagtgctcataacgacctacgttaattacctcattgacggcatgaagtgtatcaaaatgaaatgaacaggatatgtgcgaccactcacaaattaactttcaatactttccagagtatcgttattacaattaaatacctttaaatatcaacaagttaaagtataaaaatcagcataaaccctgatttttgtcaaaaaaaatgacggggataaccatattttatggcgataacatcattcgttatgtggttaatacaaaaaaggggctgagaccatatttcaagcaattaccggataattaccaggcaaaatttgagttaaatttaatgagcaagttctcaaattttattataaataaaccattttcagtgataaataatgcggcatgtcacattttttcacgctatttgttggagaacaaacatttattttatcaatattttaaaatttcgaatacatgtattgatcatctcgaacaattgattaacgtcaactttttctcttctgacaggacgtcattttgtgaatgcaatcgttttccataaattcttctcccctcataggcgacgaatagcattttgtgttgaggatcacaaaacgaataattgctgatcgccgcgataaggtcagacaaagacaacaagggaaattttcacagagcttttgatcggcgtaggccacagaatgttgcttcgtttactgtaacgccgggtaaatgagcgttttttgatagtgcgaaagaaccctgcgaggaaaataagcatctattattgtttgtcatgatgacaaggcaggcatcaatgaaaggcttcccaattgcgcatatttttcacccttcaatcccgccaatgcacgcagtggttaacaatcacaatagaaatattgattattggacggtaaaaagaaagtttgcagaaattgtctccaccaatgacgttaataaaatttacagtataagtaatgaactgcggagagtattatctgcaataactgcattgaatttctatcatggcgatgttccttctgtcatgatccgaatccaaccggaaaatatgagtccattcattatagatatttctacaggagaacatgatgattatatcatacaaacattagatgtaggcacttttgcaccttttggtgaacaatgtacttgctcagccgtcaataaaaaagagctggaatgtattaaggagacgatttctaagtattgtgcaaaattcacccgaaaagaagccatcttaaccccccttgtgcactttaataaaaccagcattacttcagattgttggcaaattctctttttttcacccgatcattttaataatgatttttattgattatttataaaggataaaataatgttccctgtttcatcaattggtaatgatattagtagtgatttagtccgtcgaaaaatgaatgaccttcctgaaagcccaacaggaaataacctcgaagcactagcaccaggtatagaaaaactaaaacagacctctattgaaatggtcactttacttaacacgttacaacctggtggaaaatgcattatcactggtgattttcaaaaagaattagcgtacttacaaaatgtaattctttataatgtctcgtctcttcgtctggattttttaggttataacgcccaaattattcaacgatcggacaatacttgtgaacttaccattaatgaaccgttaaaaaaccaggaaatatccacaggtaatatcaatattaattgcccattaaaagatatttacaatgaaatcaggaggttaaacgtaatttttagttgtgggactggagatatcgttgatctatcctctctggacttacgtaatgtcgatttagattattatgatttcacagataaacatatggctaatactattttaaatccttttaaattgaattcaacaaattttactaatgccaacatgtttcaggttaattttgttagttcaacacaaaacgccacaatctcctgggattatttactaaaaataacgcctgttttaataagcattagcgatatgtattctgaagaaaaaatcaagtttgtcgaaagttgtttaaatgagcctggagacattaccgaagaacaattaaaaattatgagatttgcaattataaaatctataccaagggcaactcttacagataaattagaaaatgaattaacaaaagaaatatataaaagctcatcgaaaatcatcaattgcttgaacagaattaaattaacagagatgaaagaattctcatcagaaaaaatatatgattacatcgatataatcattgaagattatgaaaataccaaagaaaatgcttatctggtcgtcccccaaattaattatactatggatttaaacatagaagactctagctcagaagagttactttcagataataccctcgagaaagacgaaaattctccggacaatggctttgaggtcggggaatataacacatatgaagcatataactcagagaagcaatattttaccagagaggactatacgtatgattacgaccttttaaatgcaatatagacttaataacttcttacaaagtctattattaataccgtagatatttattcatcttaccctgtgcaccaaaagcaaaaactcactgacgcgggtttgaaactgatggcaaccgcaaaaatgcctgatgcgctacgcttatcaggcctacgccatctctgcaatatattgaatttgcgtgcttttgtaggcaggataaggcgttcacgccgcatccggcatgaataaagcgcactcaacaatctgaaacccgccggaacggtttattacgtacatcaggtaaaactgaccgataagccgctttcttttgggtatagtgtcgtggacagtcattcatctttctgcccctccaaaagtaaaaacccgccgaagcgggtttttacgtaaaacaggtgaaactgaccgataagccgctttcttttgggtatagtgtcgtggacagtcattcatctttctgcccctccaaaagcaaaaacccgccgaagcgggtttttacgtaaaccaggtgaaactgaccgataagccgctttcttttgggtatagcgtcgtggacagtcattcatctttctgcccctccaaaagcaaaaacccgccgaagcgggtttttacgtaaatcaggtgaaactgaccgataagccgggttctgtcgtggacagtcattcatctaggccagcaatcgctcactggctcaagcagcctacccgggttcagtacgggccgtaccttatgaacccctatttggccttgctccgggtggagtttaccgtgccacggactgttaccagccgcgcggtgcgctcttaccgcaccctttcacccttacctgatcccgcttgcgcgggccatcggcggtttgctctctgttgcactggtcgtgggtttcccccccaggcgttacctggcaccctgccctatggagcccggactttcctcccctccgcccgtctcccccgaagaggacgacgacgaagcggcgactgtctggtcagcttcggcgcgcagtatagagggtttgcgcgcccttgtcaccccgcgttgcgcattccaatcgccagtgtcgcggcgatattacgtgaagcacggcagatattgtcataagccccgcggaatgcttcgtccaacgtacctatgctggtcaatacgctgaagaccgcatcaatgccatgctgatgtacaacgccaacatcatcggtcaggctacccgcaatgccaatcaccggtttatggtacttcttcgccacgtttgcgacaccaatcggtaccttcccgtgaatactctggctgtcaatacgcccttcaccggtgatcaccagcgtacaatcgtgaatatgttcctccagattcagcgccgtagtgacgatttcaataccacttttcagttccgcaccaagaaacgccattagcgccgcgcccataccacccgcagctcctgcaccggggacatctttcacatcaacatgcagcgcttttttaatgacctcggcatagtgagagaggttattgtccagctcaacaatcatcgcttcactggctcccttttgtgggccaaagatgcgcgatgcgccgttatcgcccaccagcggattggtgacatcacaagcgacgcgaatgacgcaatcttttaagcgcggatcgaggccggaaatatcaatatcattcagagtattaagactaccgccgccaaaaccaatttcattgccgttggcgtcgcataatttcgcccccagcgcctgtaccatgcctgcgccgccatcatttgtagcgctgccgccaatgccgataataatgtttgtcgcaccgctctccagcgcctgcaggattaactcgcctgtgccgcgtgaagtggtcacgagtggatcgcgtttttccgcaggtaccagctccagcccactggccgccgccatttcaataaacgcggttttgccatcgccggagatcccccaactggcattcactttctcgcccagcggccctgtaacccaggcgtgacgttcagccccctgggtggctgcaatcatcgcttccaccgttccttcgccaccgtcggcaaccggaacagaaacgtactgtgcatcaggaaaaatttcccgaaatcctttttctatcgcctgcgcaacctcgctggcagataaactttctttataagagtctggggcgattacgattttcatacctatgcctgttaccacatgacgccggagggcgtttctcttattcggcctggattccaggcccggattgcaatacgccatccgggcacgacgtcattaacgagtaacttcgactttcgccagtttttcgtagtagcacgccagggcgctatgatccgccgttcctaaaccatctgctcgcagtgcctgcatcatctccataaccgcagctgtgagcggcagttgtgcgccgacgccgtgagaagtatccagcgcattcgccagatccttaatatgcagatcaatacggaagcccggcttgaagttgcggtccatcaccatcggcgctttggcatccagcacggtactgcccgccagtccaccgcgaattgcctgataaaccaggtccgggttaacgcccgctttagttgccagcgttaacgcttctgacatcgcggcaatattcagcgccacaatgacctgatttgccagtttggtgacgttacctgcaccgatttccccggtatgcaccacggaacccgccatcgctttcatcaaatcatagtatttgtcgaaaatagccttgtcgccgcccaccatcactgacagcgtaccgtcgatggctttcggttcaccgccgctcaccggagcatccagcatatcaatgcctttcgctttcagcgcttcgctgatttcacggcttgccagcggtgcgatagaactcatatcgatcaataccgtacctggcttcgcgccttcaataatgccattctcacccagcgccacctctttcacatgaggggagtttggcagcatggttatgatgacgtcgcactgttcagcgatcgctttagccgtagacgctgtttctgcacctgcagcaatcacgtcagcaatagcttctgggttacggtcagcaaccaccagcgagtaacctgctttcagaaggtttttactcattggtttacccataatccccaggccaataaaaccaactttcatagtcatatcaatcatctctcttgttgcggtggtggttattttttaaaggtatcagccagtttctgagtggcagagcggaagacgccgagatcgctgccgacagccacaaacgtcgcgccccattccagataacgacgcgcatcggcttcgaccggcgcgaggataccgctgggtttgccgtgcgcgctggcacggttaaaaatgtgctgaattgctttttgtacatccgggtgtgatgcattgccgagatggcctaatgccgcggccagatcgctggggccgacgaagatgccgtctacgccttcggtagcggcaatggcatcgacgttatctacgccctgctgactttctatctggaccagaatagtgatgttcttgttcgactgagcgaaataatccgccacggtgccaaacatattggcgcggtgagaaacggagacgccgcgaatgccttccggtgggtaacgggttgatgccaccgccagctctgcttcctcttttgtttctacaaaaggaatcaggaagttatagaaaccgatatccagaagacgcttaataattaccggctcgttggtcggcactcgcactactggcgcgctggcgctgcctttcaaggccattaactgcggaataaacgtggagatatcgtttggcgcatgttcgccatccagcaccagccagtcaaacccagccaaaccaagaacttcagtgctaatcgggttagagagtgctgaccagcaaccaatttgtacctgtttcgcagccagtgcggctttgaatttattcgggaaaacatcgttattcatcgcttatacctttgcttatttctgcaattccatacgtttaatgtcgccaactacgaagaggtagcagaccatcgccatcagcgctgaacatcccacgaaaaccagtgctgcattgaaggagtgcagttcacttaccaggtagccaatcaccagtggagtgacaatggaggcaacattgccaaagacgttaaagacgccgccgcagaggccaacaatctctttcggcgcggtgtcagaaatcaccggccagcccagcgcaccaaatcctttgccaaagaaagccagcgccatcagcatgaccaccagcgtggtgttgttggtgtagttacataagatgatggtggaagccagcaacattcccagcacaatcggtagcttacgtgccagggtcagggataaaccgcgtttgatcagataatccgagaagacacctcccagcacgccgcccgcaaaaccacacagtgctggaatcgaggcgaccagacccactttcagaatcgacatgcctttttcctgcaccagataaatcgggaaccaggtgaggaagaaccaggtgatggtgttgataaaatattgtccgaaaaatacgcccagcatcatgcggttagagagcaattgcttgatgtaatgcagtttgggtccgcttgctgccgcactgcccggctttttgtggtccatatcgaccaccgcgccattttcagagataaacttcagctcttccgcagacatacgtgggtgatctgtcgggttatgaatcaacttgatccacagcgccgtcagcacaaaaccaatcacccccataacggtaaagacgtgctcccagccccaggcgaaagtcagccagccaagcagcggcgaaaagagcgccagcgagaaatattgcgccgagttaaagatggcggaggcagtaccacgttctttcgtcgggaaccaggcggcgacaattcgggcgttcgccgggaatgatggcgcttccgagaagccgagcataaagcgcataaagaacatggagatccctgcccaggccagcgggaacatatcaacaaagccttgcaggaaggtgaatagcgaccagaaaaagaggctgtaggtgtaaacttttttcgagccaaacttatcaagcagccagccgccggggatttgcatcagcaagtaggcccagccaaaagcggagaagatgtaacccatcgaaaccgcacttaactgcaactcttttgccacttcggtaccagcaatagacagcgttgcacgatcggcgtagttaacggcggtaacaataaaaataatcagtaatattaaatagcgggtatgcacgcctttctttttttcgtcaacggtgtccagaatcattttatttacctcgggtacttatgctgatttttattattatggggaaggtgttatttatgagtttcatttatgccgtaacgacaatgaactcgggaattagtataagcagcgcgagaataataatcattgtgcaaatgctaatttaattaatactatttaaatattattttgagcatatgcacataaggttgcgcgctaaagcacagatttgcgctttaccttaccgggcggcactgcaatccctgaaatgattgacattgatcacatttctgcgtttaaactcctgacattcttatttcacccaatgaagtcatttatttttaaatgagaccaggtcctcattttaataacccctggctggagaatattgcacaatggccaacatcgaaatcagacaagaaacgccaactgcgttttatataaaagttcacgacacagataatgtggcaattattgttaatgataatggcctgaaagcaggaacgcgttttccggatgggctggaattaattgaacatattccccaggggcataaagtcgcattgctggacattccggctaatggtgaaattattcgttatggcgaagtgattggttacgccgtgcgtgcaatcccacgcggaagctggatcgacgaatcaatggttgtactaccggaagcgccgccgttacacacgctgccactggcaaccaaagtcccggaacccttaccgccgctggaaggatacacctttgagggctatcgcaatgccgatggcagcgtgggcaccaaaaacctgctcggtatcaccaccagcgtccactgtgtggcaggcgtggtggactatgtagtaaaaatcattgaacgcgatctgctaccgaaatacccgaacgtcgatggcgtggtggggctgaatcatttgtacggttgtggcgtggcgattaacgcaccggcggcagttgtacctatccgtaccattcacaatatttcgctgaatcctaactttggcggcgaagtaatggtgattggcctgggttgtgaaaagttgcagcctgagcgcctgctgactggaacggatgatgtgcaagctattccagtagaaagcgccagcattgtcagtttgcaggatgaaaagcatgtcggttttcagtccatggtcgaggatattttgcagatcgccgaacgccatctacaaaaactgaatcaacggcagcgagaaacctgcccggcttcagaactggtcgttggtatgcagtgcggtggcagcgatgcgttttctggtgtaacggcaaacccggcggttggctatgcgtctgatctactggtgcgctgcggcgcaacggtgatgttttcagaagtaacggaagtgcgtgacgcgatccatctgctgacaccacgcgcagtgaacgaagaggtcggcaaacggctgctggaggagatggagtggtacgataactatctcaatatgggaaaaaccgaccgcagcgccaacccttcgccgggcaacaagaaaggcggtctggcaaacgtggtagagaaggcactcggctccattgctaaatcgggtaaaagcgcaattgttgaagtgctgtcgcccggtcaacgcccgactaaacgcggattaatttacgccgcgacgccagccagcgattttgtctgtggcacgcaacaggtggcttcgggtatcacagtgcaagtgtttacgaccggtcgtggtacgccgtacggcctgatggcggtacccgtcattaaaatggcaacccgcaccgagctggcgaaccgctggtttgatttaatggatattaatgcgggcaccatcgctaccggcgaagaaactattgaagaggtgggctggaagttgttccactttattctcgacgtcgccagcgggaagaagaaaaccttctcggatcaatgggggctgcataaccagctggcggtgtttaacccggcaccggtgacctgatttcttttggaacgtccctcgcaaaacatggccttagtgccatgtttttattgtttaaagcccccacgtccattaataatgcatttgcattaccttagttcaagcttataatttgagcagaaaacaggctgtaaaaggacagtgaatcatgcccgctaatgctcgctctcacgctgtactgaccactgaatcaaaggtcacgatacgcggacaaacaactatccccgcgccagtgcgtgaggccttaaaactgaagccaggccaggacagcattcattacgaaattctgcctggtgggcaagtatttatgtgccgactgggagatgaacaggaggatcatactatgaatgcatttttgcgttttctggatgcagatatccagaacaacccgcaaaaaactcgtccattcaacattcaacaaggaaagaaacttgtcgctggcatggacgtcaacattgatgatgagattggcgacgacgaataatggattttccacaaagggttaatggttgggcgctatatgctcatccctgttttcaggaaacctacgacgctttagttgccgaagtcgagacattaaagggaaaagatcctgaaaattatcagagaaaagccgccacaaagttattggcggtagtccataaagtgattgaggagcatatcacggtcaatccatcatcaccggcattccgtcatggcaagtcgttaggctctgggaaaaataaagactggtcacgggtaaaatttggtgctggtcgttatcgtctcttctttcgttatagtgaaaaagagaaagtcatcattctgggatggatgaacgatgaaaacactctgcgcacctacggtaaaaaaacagatgcctataccgtattcagcaaaatgttaaaaagaggacatcctcctgccgactgggaaaccctcacccgagaaacagaagaaacccattgatggtgttcacaatgcccgccgaacgcattcgtgttgaccagcgggcatcctttctcactccccgaccagaatcacttcaaccccagcctttcgcagtccttccaggctatccgcaggaatgccttcatcaacaatgatcatgtcgatacgttgagtatcaatgatcttatgtaaactggaacgattgaacttactggaatcggtgaccacgatgatccgttccgcaacttcgcacatccgacggtttaaacgagcttcatcttcattatgtgtgctgacgccgcgctccagatcgatcgcatctacaccaagaaacagcatatcgaagtggtaattttgcagcgattgctcagcctgatcgccgtaaaaagattgcgactgacggcgcaaatgcccgccggtcatcagcagctcaacgccttccgcttccagcaacgcattagccacgttcataccgttggtcatcgcaattacgtcagtgtgcttgcgcatcagacgagcaatctcaaaagtggtggtcccggaatcgaggataacccgatgacctggctgaatcaactcaacggcagctttcgcaacgctgcgtttcatcgcggtgttcagtgcgcttttatcttccactgatggctcgactgacggcgtcgtgctatcgcagatcaacgcgccaccataggcacgcacagcgatcccctgcttttccagaaacgccagatcgttgcggatcgtcacagtagatacgccatacaatgccgacagatcgttaacctgcacactcccttgctgtcgcagacgctgaatgatctgttctcgtcgctcgctggtgccagtcactcgcttctcacctgaagcgtcggtattactcatagtaagtcctttcgtaaaactttcgtttcatttcgttttgcctattaacgcctttctattaagcaaatgcaagcccaccttgcccattgacgcaagctactctcgtttcagtgactttcattatgtttcttttgtgaatcagatcagaaaaccattatctttcgttttatttttatctcaccatgacgcagtatcaactgaaacaaaacgaaagattaatatcgcagtaatctgaactggagaggaaagtgaaacatctgacagaaatggtgagacagcacaaagcgggcaaaacaaatggaatttatgccgtttgttccgcacatccgctggtgctggaagctgcaatccgctacgccagtgcaaaccaaacgccgttactgattgaagcaacctccaatcaggtagaccagttcggcggttataccggaatgacgcccgccgattttcgcggctttgtttgtcagctcgccgactcgttgaatttcccgcaggatgcgttgattctgggtggtgaccatctggggccaaaccgctggcaaaacctgccggccgctcaggcaatggccaatgccgatgatttgattaaaagctacgttgcggcaggattcaaaaaaatccaccttgattgcagcatgtcctgtcaggacgatccgattcccttaactgatgacatcgtggctgaacgcgccgcccgtctggcgaaagtggcggaagaaacctgtcttgaacactttggcgaagccgatctggagtatgtcattggtaccgaagtgccggtacctggcggcgcgcatgaaaccttaagcgagctggcggtcaccacgccggatgccgcccgcgccacgctggaagcccatcgtcacgcctttgaaaagcaaggtttgaatgccatctggccacgcatcattgccctggtggttcaacccggcgtcgaattcgatcacaccaacgttattgattatcagcccgccaaagcgagcgccttaagccagatggtcgaaaactacgaaacgctgattttcgaagcgcactctaccgattatcaaacgccgcaatcgctgcgccagctggtgattgaccactttgccattctgaaagttggcccagcgctgaccttcgccctgcgtgaagctctgttctctctggcggcgattgaagaagaactggtgccagcgaaagcctgttctggtctgcgtcaggtgctggaagacgtgatgctcgaccgcccggaatactggcaaagccactaccacggtgacggcaacgcgcgtcgtctggcgcgtggttatagctactcggatcgcgtgcgctattactggccggacagccagattgatgacgctttcgctcatctggtacgtaatctggcggattcaccaattccgctgccgctgatcagccagtatctgccgctgcagtacgtgaaagttcgctccggcgagctgcagccaacgccacgggaactcattatcaaccatattcaggacatcctggcgcagtaccacacagcctgtgaaggccaataagcaaaacaaagaggaacacgctatgccaaatattgttttaagccggattgatgaacgcttgattcacggtcaggtcggcgttcaatgggtcggatttgcgggggcaaatctggtgctggtagccaacgatgaggttgccgaagatccggtacaacaaaacctgatggaaatggtactggcagaagggatcgccgtacgtttctggacgctgcaaaaagttatcgacaacattcatcgcgccgccgatcgacagaaaatcctgctggtttgtaaaacacccgccgatttcctgacgctggtgaaaggtggcgttccggtgaatcgcattaacgttggcaatatgcactacgccaatggcaaacaacaaatcgccaaaacggtttctgtggatgcgggcgatatcgcagcatttaacgacctgaaaaccgctggggtggaatgcttcgttcagggcgtcccgacagagcctgctgtggacctctttaaattactttgagggattcatcatggaaatcagcctgttgcaggcatttgcgttgggcattatcgcctttatcgctggcctggatatgtttaacggcctaacccatatgcaccgcccggtggtcctcggcccgttggtcgggctggtacttggcgatctgcataccggaattttaaccggcggtacgctggaactggtgtggatggggctggccccgctggcgggcgcacagccgcctaacgtgattatcggtactatcgtcggcacggcgtttgccattactactggcgtgaaacccgatgtcgcagtaggtgtcgccgtacctttcgctgtcgcagtacagatggggattaccttcctgttctcggtgatgtccggcgtgatgtctcgctgcgacctggcaacaaacccgcgccgcatttgatgctggtgccgacggcctggtgcattgctataacgggatgacaggtttacatcaccgcgaaccgggaatggttggcgcgggattaacggacaagcgcgcctggctggaactgatagccgatggtcatcatgtgcatccggcggcaatgtcgctgtgttgttgctgtgcgaaagagagaatcgtactgatcaccgacgcgatgcaggcagctgggatgccggatggtcgctatacgttatgtggtgaagaagtgcagatgcacggtggcgttgtccgtaccgcgtctggtgggctggcgggcagtacgctgtctgttgatgcggcagtgcgcaatatggtcgagttgacgggcgtaacgcctgcggaagccatccatatggcgtcgctgcatccggcgcgaatgctgggtgttgatggtgttctgggatcgcttaaaccgggcaaacgcgccagagtcgttgcgctggatagcgggctacatgtgcaacaaatctggattcagggtcaattagcttcgttttgatagtttgctcctttattgggccttcacttcccccgtaaggcctttctttttctttcgttttgatctgtgcagcggtgtcggatgcgacgctaacgcgtcttatccgacctacagttggtgaccgcaaggccggataaagcgtttgcgccgcatccagcaatcccttttgcttcctttatcttttctttcaacgatcacaaatttcgttttatttcttttttctccattgaactttcagtttcttttctatagattttaatcaacgaaagacatcaccaagtgaaatgaaacgaaaggcaagtgaaagcgacaacgcccgacgtcaagttcatcagactaaggattgagttatgccagaaaattacacccctgctgccgccgcaaccggtacatggactgaagaagagatccgccatcagcctcgcgcatggatccgttcactcaccaacatcgacgcgctacgttccgcgctcaataacttccttgaaccgttactgcgcaaagagaatctgcggatcatcctgaccggagccggaacgtcggcatttatcggtgacatcatcgcgccgtggctcgccagccataccggtaaaaacttcagcgccgtaccgaccaccgatctggtcaccaatccgatggactacctgaacccagctcatccgctgctgttgatctccttcggtcgatccggcaacagcccggaaagcgtcgcagccgtggaactggcaaatcaatttgtaccggaatgctatcacctgccgatcacctgcaacgaagcgggcgctctttaccaaaacgcgatcaacagcgataacgcgtttgccctgctgatgcccgcagaaacgcacgatcgcggctttgcgatgaccagcagcattaccaccatgatggccagctgcctcgcggttttcgcacctgagacgatcaacagccaaaccttccgcgacgtggcggatcgttgccaggcgatcctgacctcactgggcgatttcagcgaaggtgtgtttggttacgcaccgtggaaacggatcgtttatctcggtagcggtggcttacagggcgcagcacgcgagtcggcgctgaaagtgctggaactgacggcgggtaaactggcggccttttatgattctccaaccggattccgtcatggaccaaaatcgctggtcgatgacgaaacgctggtggtggtatttgtctccagccacccttacacccgtcagtatgatcttgatctgctggctgaacttcgccgtgacaaccaggcaatgcgtgtaatcgccatcgccgcggaaagcagcgacatcgtcgctgccggtccacatatcatcctgccaccgtcacgtcactttatcgacgttgagcaggcattttgcttcctgatgtacgcccagacgtttgcactgatgcagtcgctgcacatgggcaatacgccggataccccatcagccagtggcaccgttaaccgcgtggtgcaaggcgtaatcattcatccgtggcaggcataagaggatcgcattatgagcattatctccactaaatatctgttacaggacgcccaggccaatggctacgcggtgcctgcttttaacattcataacgccgagacgatccaagcgatcctcgaagtgtgcagtgaaatgcgatcgccggtgatcctcgccggaacgccggggacctttaaacacatcgcgctggaagagatctacgccctgtgtagcgcctattccacaacctacaacatgccactggcgctgcatctcgaccaccacgaatcgctggatgatattcgccgtaaagtccacgcaggtgtgcgcagtgcgatgatcgacggcagccacttcccgtttgccgagaacgtgaagctggtgaaatcggttgttgacttctgccactcacaagattgcagcgtggaagcagaactgggccgcctgggcggtgttgaagatgacatgagcgttgacgccgaaagtgcattcctgaccgatccacaagaagctaaacgctttgtcgaactgactggcgtcgacagcctggcggtagcgattggtacggcgcacggcttatacagcaaaacgccgaagattgatttccagcggctggcggaaattcgtgaagtggtggatgttcctctggtgctgcatggtgccagcgatgttccggatgaatttgtccgtcgcactattgaacttggcgtcacaaaagtgaacgttgccacagaattaaaaatagccttcgctggcgcggttaaagcctggtttgcggaaaatccgcagggtaatgatcctcgttattatatgcgcgtcggaatggatgcgatgaaagaagttgtcagaaataaaattaatgtctgtggttcagcgaatcgaatttcagcataatcattagttttttatgatttatcccaatgtacttcccgattaatatcggggagtgccttaatggaaaaggagataactaaaccttaataaatacatcactacaatatcgcaacaataatatatttaaaaaaattatattattcaactttatggtgaggattacacaatgaccagtccaaatattctcttaacccgtattgataaccgtctggttcacggtcaggttggcgtgacctggacatccaccatcggtgcaaatctgctggtagtcgtggatgatgttgtcgctaacgatgatattcaacagaaattaatgggtattaccgcggaaacctacggctttggcattcgtttctttactatcgaaaaaaccattaacgtcatcggcaaagctgcaccacatcagaagatcttcctgatttgccgtacgccacaaacggtacgtaaattggtagaaggtggtattgacctgaaagatgtcaacgtcggcaatatgcatttctcggaagggaaaaagcaaatcagcagtaaagtttatgtcgatgaccaggatctcacggacttacgttttattaaacaacgtggcgtgaatgttttcattcaggacgtccctggcgatcaaaaagaacaaatccctgactaaatctaaaatcgccttaatattggtttgaggtaataaaaatgcatgaaataaccctacttcagggattatccctggcggcgttagtttttgttctggggattgatttttggctggaagccttatttttattccgcccgataatcgtttgtaccctaactggcgctattctcggtgatattcagactggcttaattaccggtggtctgacagagttggctttcgccggattaacccctgcaggtggtgttcagccgcccaacccgattatggcgggtctgatgaccaccgtcattgcatggtctacgggcgttgatgccaaaacagcaattggtcttggcctgccgtttagtttgttaatgcagtacgtcattctgttcttctattccgctttctcattatttatgaccaaagccgataaatgcgcgaaagaggcggatacggcagcgttttcccggcttaactggacaacgatgctcatcgtcgcttcagcgtatgcggtgattgctttcctctgtacttacctggcacagggggcgatgcaggcgctggtgaaagcgatgcccgcctggctgacccacggctttgaagtggctggcggtattctgcctgccgttggttttggcttgctgctgcgcgtaatgttcaaagcgcaatatatcccttacctgatcgccggtttcctgtttgtttgctacatccaggtcagcaacctgttgccggttgccgtactgggcgcaggctttgcggtgtatgagtttttcaatgcgaaatcccggcagcaagcgcaaccgcagcccgttgccagtaaaaatgaagaagaggactacagcaatgggatctgaaatcagtaaaaaagatatcacccgtctgggctttcgttcgtcgctgctgcaagcgagctttaactacgaaaggatgcaggcgggcggttttacctgggcgatgttgccgatcctgaaaaagatttataaggacgacaaaccgggcttaagcgcggcgatgaaagataacctcgaatttattaatacccacccgaatctggtcggattcctgatggggttattaatttcgatggaagaaaaaggagaaaaccgcgacaccattaaaggcctcaaagtggcactgtttggcccaatcgccgggattggcgatgcgattttctggtttactttgttgccgattatggcgggaatttgctcatcatttgccagccagggaaacctgctggggccgattctatttttcgccgtttacctgcttatctttttcctgcgcgtcggctggacccacgtcggttattcagtcggcgtgaaggcgatcgataaagtgcgagagaactcgcagatgattgcccgttcggcaaccatcctcgggatcacggtaatcggcgggctgatcgcttcgtatgtgcatattaacgtggtgacatcgtttgccatcgacaatacccacagcgttgcgctgcagcaggatttcttcgataaagtcttcccgaacattttaccgatggcctacaccctgctgatgtattacttcctgcgggtgaaaaaagcgcatccggtgctgttaatcggcgtgacttttgtgctctctattgtttgttccgcattcggcattttgtaaatggaacgaggcactgcgtctggtggtgcctctttacttaaggaatttcatcctgtgcaaacccttcagcaagttgaaaactatacggcgttaagtgaacgtgccagcgaatatttattggccgtgatccgtagcaaaccgaatgccgtgatttgcctggcgaccggagccacgccattactgacgtatcattatctggtagaaaaaatccaccagcagcaggttgatgtcagccagctcaccttcgtgaagctcgacgaatgggtggatctgccattaacgatgccaggcacctgcgaaactttcctgcaacagcatatcgtgcagccgctggggctacgtgaagaccagctcatcagctttcgctccgaagagataaatgagacagagtgcgaacgggtaacgaacctgattgcgcgcaaaggcggtctggatttatgcgttctcggattggggaaaaacggtcatcttgggctgaacgaaccgggagaaagcctgcaaccggcctgccatatcagtcaacttgatgccagaacacagcaacatgagatgttaaaaaccgcgggtcgccccgtgactcgtgggatcaccttaggcctgaaggatattctcaatgcccgcgaagttttgttactggtgactggcgaaggaaagcaggatgcgacagatcgttttctcacggctaaagtctctaccgctatcccggcttcatttttatggctgcacagtaactttatttgtttaattaacacctaaccagatgaaaaatttgctcaaaatgtttaaattaacttatgtaacagtcacgcattatattaaataacatttgactgggttgaacataacgccgatagcaaaaggagttatgttcaacaatttaattttagatatacatataacttgttctattaataaatcacctcgtattctgactcgccccctggcgcagcaaagtcaggcatttatactcttttgaatacatagaaaattgatatcaatataatgaaaatatcaaatatttgcatataaatataatcttaaagttcagtctatttaatgttcaatgaaatatttctgcctgtataatctttaaagatgttgaacatatattcacattaaatatgattatgtacttgttacaaggataaggttatatatgaataaagttacaaaaacagctattgcgggcttacttgcgcttttcgcaggtaatgccgctgcaaccgatggtgaaatagtttttgatggcgagattttaaaatccgcttgtgaaatcaatgactctgataagaaaattgaagttgctcttggtcactataatgccgaacagtttcgtaatattggcgagcgtagcccaaaaattccattcactattcctttagttaactgcccaatgactgggtgggagcacgataacggcaacgttgaagcgtctttccgtctatggctggaaacgcgagataatggcaccgtccctaacttccctaatctggcaaaagtaggctcttttgctggcatagcggcaacaggtgtgggtatccgtattgacgatgcggaaagcggaaacattatgccactgaatgctatgggcaatgataacacggtttatcagatcccggcggaatccaatggtattgtcaatgttgacctcatcgcttactacgtatcaaccgtagttccatcagaaatcaccccaggggaagcagacgctatcgttaacgtaacgctggattaccgttaatacgttagggcgttatctgacctgtcagataacgcccttttccttcctctttctcgttgtatcaggttgaaaaataactatgtcaaaacgaacattcgcggtgatattaaccttgttgtgtagcttctgtattggccaggcgcttgcaggaggaatcgttttacagcgaacgcgagtgatctatgatgccagccgcaaagaggctgcgttacctgtcgcaaacaaaggcgcagaaacgccttatttactgcaatcatgggtagataatatagatggtaaaagccgtgccccatttattataaccccaccgctatttcgtcttgaggctggcgatgactcatcactgcgaattattaaaacagctgataacctgcctgaaaataaagagtcgctgttctacattaatgttcgtgccattccagcaaagaaaaaatcagatgatgttaatgctaacgagttgacgctggtatttaaaacacggatcaaaatgttttatcgccccgcacacctgaagggacgggtaaacgatgcgtggaaatcactggaatttaaacgtagtgaccattcactcaatatatataacccaactgaatattacgtcgtatttgccggactggcagtcgataaaaccgatctcacaagcaaaattgaatatatcgcgcccggagaacataaacagttaccacttcctgcatctggcggaaagaacgtgaaatgggctgcgatcaatgattatggcggcagttccgggacagaaactcgtccactgcaataaaaaatataaaaacacaggtcatcagggaatgccacaacgacaccaccagggacataaacgcacaccgaaacagttggcgctcatcatcaaacgttgtttgccgatggtgctcactggcagcggcatgctttgcactaccgctaacgccgaagagtattatttcgaccccattatgctggaaaccacaaaaagtggtatgcaaacaaccgatctgtcgcgtttttcaaaaaaatatgcacaactaccaggaacttatcaggttgatatctggctgaataaaaagaaggtttcacagaaaaaaattacatttaccgccaatgcagagcaacttctgcagccacagtttacggtagaacaactacgtgagctgggtattaaggtggatgaaatcccggcgctggctgaaaaagatgacgatagcgtgatcaactcgcttgaacaaatcattcccggtacagctgctgaatttgatttcaatcatcagcaacttaatttgagcattccccaaattgcactgtaccgtgatgcaagaggttacgtctccccttctcgttgggacgatggtataccaacgctgtttaccaactactcgtttacaggttctgataaccgttaccgccagggcaatcgtagccaacgacagtacctgaatatgcaaaatggtgctaattttggcccctggcgattacgcaactattccacatggacacgcaacgatcagacatcaagctggaataccatcagtagttatttacaacgtgatatcaaggcgttgaagtctcagttgcttctgggagaaagcgccaccagcggcagtattttttccagctacacctttactggcgtgcaactcgcttccgacgataatatgttgccaaacagccagcgcggatttgccccaacggtacgcggtatcgcaaacagtagtgcaatcgtgactatcaggcaaaatggttatgtgatctatcaaagcaacgtgtcagcgggtgcctttgaaattaacgatctctacccctcttccaacagcggcgatttagaagtcacgattgaagaaagtgacggtacacaacgtcgctttatccagccttattcttcattacccatgatgcagcgacctgggcatctaaagtatagcgcgaccgctggacgctatcgcgctgatgcaaacagtgatagcaaggaacccgaatttgctgaagccacggcaatatatggtttgaataatacttttacgctgtatggcggcctgctcggttctgaagattattatgcgctggggatcggtatcggcggcacacttggcgcactgggcgcgttgtcgatggatatcaacagagctgacacccaattcgataaccagcactcttttcatggctatcaatggcgtacgcagtacatcaaagatatcccggaaaccaacaccaatatcgctgtcagctactatcgctataccaacgatggctattttagttttaatgaagccaatacccgcaattgggactataacagtcgccaaaaaagtgaaattcaattcaacatcagccagacaatatttgatggggtaagtctgtatgcctccggttcgcagcaagactattggggcaataacgataaaaacaggaatatctctgttggggtttccggccagcaatggggagttggttacagcctgaattatcaatacagccgctacactgatcaaaataatgaccgcgcactctctttgaatctcagtattccgttagaacgctggttaccgcgtagccgggtttcctatcagatgaccagccagaaagatcgcccaacccaacatgaaatgcgtcttgatggctcactgctggatgatggtcgcctgagctatagcctggaacaaagtctggatgacgataacaaccataacagtagcctgaacgccagttaccgttcaccttatggcaccttcagtgccggatacagctacggtaatgacagcagccaatacaattacggcgttaccggcggcgtggttatccatcctcatggcgtgacgctctcgcaatatctgggcaacgcttttgcgcttatcgatgctaacggagcatctggcgtgaggatacaaaactatccggggattgctaccgatccttttggctatgcagtggttccttatctcacaacttatcaggaaaaccgtctctcggtagatactacgcagctgcccgataacgtcgatcttgaacaaacaacacagtttgtggtgcccaacagaggtgcaatggtagcggcgcgtttcaacgccaatatcggttatcgcgtacttgttacagtcagcgatcgcaacggtaaaccgttgccctttggcgctcttgccagcaacgatgatacggggcaacaaagtatcgtcgatgagggcggcatactatatctctctgggatatcgagtaaatcacaaagctggactgtacgctggggaaatcaggcagatcaacaatgtcagtttgctttcagtacaccggattcagaacctacaacctctgtattacaaggcacagcgcagtgccattaaggataaaaaaatgaaaagagcgcctcttataacaggtcttttgttgatatccacatcctgcgcttatgcctcctcaggagggtgtggagccgacagcactagcggtgcgacaaattacagcagtgtggttgatgatgttacggtgaaccagacagataacgtgacaggacgggagtttacctctgcaacgctaagtagcactaactggcaatacgcctgttcctgctctgcgggtaaggcagttaaacttgtctatatggtcagccccgtacttaccaccactggacatcagacaggatattacaaactcaatgacagcctggatattaaaaccacattacaggcaaacgacattccaggactcacaaccgaccaggttgtctctgttaacacccgattcacacagataaaaaacaacacggtatattctgctgcaacccaaacgggtgtttgccagggtgatacgtctcgttatggacccgttaatattggtgcgaacaccacctttaccctgtatgtcaccaagccatttctcggctcgatgaccattccgaaaacggatattgccgtcattaaaggcgcgtgggtcgatggaatgggaagcccgtctacaggtgacttccatgatttagtcaagttatcgattcagggaaatctcaccgccccacagtcgtgcaaaattaatcagggcgatgttattaaggttaattttggattcatcaatggtcagaagtttaccacccgcaatgccatgccagacggttttactccagtagactttgatatcacttatgactgtggtgatacttcaaagattaaaaactcgttgcaaatgcgcatcgacggtacaactggggtagtagaccagtacaacctggtcgccaggcgaagaagttcagacaatgtgcccgatgtcggtattcgtattgaaaatctcggcggcggagttgcaaatattccttttcagaacggtatccttcccgttgatccttccgggcatggcaccgtcaatatgcgcgcctggccagttaatctggtcggtggtgagctggaaacaggaaaatttcagggcacagccaccattaccgtcatcgtgcggtaaaagaagacgttgcgttttgattaacgcaacgcttcggcactgttacccctgctgctccagcgcatacttatacagcgcatttttcttcacgccgtgaatttctgcggccagcgccgccgcttttttcagcggcagttctgcctgtagcagcgccagcgtgcgcagggcatcggcgggtaagtcttcttcctgtgctttatgaccttcgacaatcagcaccatttcgcctttgcgacggttttcatcttcctttacccacgccagcagctcgccaacgggcgcgccgtgaatggtttcccaggttttggtcagctcacgcgccagaaccacgtagcgggattcgcctaataccgcaacgatatcttccaggctatctaacagacggtgggtagattcataaaaaatcagcgtgcgcggctccgcttcaatggcttttagcgcatcacggcggccttttgatttggcaggtaaaaagccttcgtaacagaaacggtcagagggtaaacccgctgcgcttaacgcagtgatagcagcacacggcccgggtagcggcaccacgcggatccccgcttcacggcaggtacgcaccagatggtagccaggatcgttaattagcggcgttccggcatcggaaaccagcgcaatgttttgcccctcttgcagcttcgccagcagcgtttcagctttttgttgttcgttatggtcgtgcagcgcaaacaaccgggcattaatcccaaaatgttgcagcaataaaccggtgtgacgagtatcctcggcggcaatcagatcaacggcctgtaatacctctaacgcacgctgggtgatatccgccagattgccgattggcgtcggtacaatgtaaagctggccctgagaattatccgccgattggtgttgtttcattgtgtcgtccgtattgccgatttaatattgagcattgcgtaaaaaaaatatcactggatacattatggtaccctcaacattttctcgtttgaaagccgcgcgttgtctgcctgttgttctggcagccctgattttcgccggttgtggcacccatactcccgatcagtccactgcttatatgcagggcacggcgcaggctgattctgccttttatcttcagcagatgcagcaaagctctgatgataccaggatcaactggcaattactcgccattcgtgcactggtgaaagaaggtaaaaccgggcaggcggttgagttgtttaaccaactaccgcaagaactgaacgatgctcagcgtcgcgagaaaacactgctggcggtagagattaaactggcgcagaaagattttgctggcgcgcaaaacttgctggcgaaaatcacacctgccgatttagaacaaaaccagcaagcgcgttactggcaggcaaaaatcgatgccagccaggggcgtccttccattgatttactgcgcgcgttaattgctcaggaaccgctgcttggcgcgaaagaaaaacagcagaatattgatgccacctggcaggcgctctcctccatgactcaggaacaggcgaatacgctggtgatcaacgccgacgaaaatattctgcaaggctggctggatctgcagcgcgtctggtttgataaccgtaacgatcccgacatgatgaaagccgggatcgccgactggcagaaacgttatccgaacaatccgggcgcgaaaatgctgccaacgcagttggttaacgtaaaagcgtttaaaccagcctcgaccaacaaaatcgccctgctgttgccactgaatggccaggcagcggtatttggtcgcactattcagcaaggctttgaagcggcgaaaaatatcggcactcagccagtggcagctcaggtagctgccgcacctgccgcagacgtagctgaacaacctcagccgcaaaccgtggatggcgttgccagcccggcacaagcctcggttagcgatctgaccggtgaacagcctgcagcccagccggtgcctgtaagcgccccggcgacaagcaccgcagcggtaagcgcacccgcaaatccatccgcagagctgaaaatctacgatacctcatcacaaccacttagccagatcttaagccaggttcagcaggatggcgcgagtattgtggtcggtccgttgctgaaaaataacgttgaagagttgctgaagagcaacactccgctgaacgtactggcactgaaccagccggagaatatcgaaaatcgcgtcaatatttgttacttcgcgctttcaccggaagacgaagcgcgcgatgcagcgcgtcatattcgtgaccagggtaaacaagcgccgctggtgctgatcccacgcagttcattgggcgatcgcgtagccaatgcgtttgcgcaagagtggcagaaactgggcggcggcaccgttctgcaacaaaaatttggttccaccagcgaattacgcgcgggtgttaacggcggttctggtattgctttaacgggtagcccgattactctcagagcgacaaccgactccggcatgacgaccaacaatccaacgctgcaaaccacgccaaccgatgaccagttcaccaataatggcggtcgtgtcgatgcggtgtacattgtggcaacgccgggtgaaatcgcttttatcaaaccgatgatcgccatgcgtaacggtagccagagcggtgcaacgctgtacgccagctcccgcagtgcgcaagggaccgctggcccggatttccgactggagatggaaggcttgcagtacagcgaaatcccgatgctggcaggcggtaatctaccgttaatgcagcaggcactcagcgcggtgaataacgattattcactggctcgcatgtatgcgatgggcgtcgatgcctggtcgctggcaaatcatttctcacaaatgcgccaggttcagggttttgaaatcaacggtaataccggaagcctgacggctaacccggattgcgtgattaacaggaacttatcatggctacagtaccaacaaggtcaggtagtccccgtcagttaaccaccaaacagaccggcgatgcgtgggaagcacaagcgcgtcgctggctggaaggcaaaggactgcggtttatcgccgctaacgtgaacgagcgtggcggcgagatcgatctgataatgcgtgaaggccggaccaccatttttgtcgaggtacgctatcgccgctctgcgctttatggcggcgcggcagccagtgtgacccgcagcaaacaacacaaattattacagactgcccgcttgtggctcgcgcgtcataatgggagttttgatactgtggattgccggttcgatgtggtagccttcaccgggaatgaggttgagtggattaaggatgcctttaatgaccactcataattaaggtttaaggattagcgtgcaagaaagaattaaagcttgcttcactgaaagcattcaaactcaaattgcggcggcagaggcgcttccggatgccatctcccgtgcagccatgacgctggttcagtctctgctcaatggcaacaaaatcctctgttgtggtaatggaacttccgctgccaatgcacagcattttgctgccagcatgatcaaccgtttcgaaacggagcggcccagcttacctgccattgcactaaatactgataatgttgtcttaacggcgattgccaacgatcgcttacatgatgaagtgtatgcaaaacaggtgcgggcgctgggtcatgcgggagatgtattgttagccatttccacccgtggcaacagccgcgatattgttaaagcagttgaagccgccgttacgcgtgatatgaccattgtggcattgaccggctatgacggcggcgaacttgcaggtttgttagggccacaggatgtggagatccgcattccttcgcatcgtagtgctcgcattcaggaaatgcatatgctgacggtaaattgcctgtgcgatctgatcgataacacgcttttccctcaccaggatgattaaggagaatacatgaaggcattatcgccaatcgcagtccttatttccgcgctgctgttgcaaggttgtgttgccgctgccgtagtgggtaccgctgctgtgggtaccaaagccgcaactgacccacgcagtgtcggcacccaggtggacgatggtaccctggaagtgcgcgtgaacagcgcattgtcgaaagacgaacagattaagaaagaagcgcgcattaatgtaacggcctatcagggcaaagtgctgctggttgggcagtcaccaaatgctgaactttcggctcgcgccaaacagattgctatgggcgtagacggtgccaacgaagtgtataacgagattcgtcagggccagccgattggtctgggcgaagcatctaacgatacgtggatcaccaccaaagtgcgttcgcagctcttaaccagcgacctggtgaaatcgtccaacgtgaaagtgaccaccgaaaacggtgaagtgttcctgatggggctggtgactgaacgtgaagcgaaagcggcggcagatattgccagccgggtgagcggcgtgaagcgggtaactacggcgtttacgtttattaaatagcagccccttgtaatgcctgatgcgacgcttgccgcgtcttatcaggcctacaacgatacaaaccgtaggtcagataaggcgtttacgccgcatccgacatgttttccctcaaatcagaacaacagcgccagcccgccgacaatcacaccagacactgccaccatcgcccctgtcagccataaggctttcgccgggaacgctttgcgcagcataatcagtgacggcaaactcactgccgggagcgtcatcaacaatgccagcgccggagcggttcccatacctgccagcatcatcgtttgtacaatcggaatttctgctgccgtgggaatgacaaacaagcatcctgctaccgccatcgccaccacccacatcaggctgttatcgacagcaccatcggcatgggggaataaccagacgcgagcggcacccaacaccagtactgcaaggatgtaaaccgggatcgtactccagaaaagcgtccatagcgccctgccccagcggctaaaaaacccgccctgtgcttccggtatgtcaatttcgaccggtgcctgcgtttgcggtgtttcacgcacccatttttgcaccagcgtcgcaatcagcaacaccatcaccagcccggccaccagacgaatcgccgcaaaaccccagccgaggacaaagcccataaacaccagcgtcgccgggtttaacaccggattgcccatccagaatgccagcgcaccgcccatcgacacctgttggcgacgcattcccgccgcgaccggagccgcacagcaggtacacatcatgcccggcaacgaaaacagcgttcccagcagcgtgccgcgaaagcgcgattgcccaagcgtacgcaacaaccagtcacgcgggatcagcacctgaatcaacgaaccgaggatcacccccagcaccgccgctttccataccgcgaggaaatagatcatcgcgtaatccaacgccgcctgccatgggttagcatccgcctgcgcaaggatagatttaccgatactgtgggtttcggcagcagtaaacgctttgccgtagtaaggttcccatttcacataccagagaccggcaatgacaacgagaaagaaaagcgcgggtttccaccactgaatgggcgttgccgcctgagatgaagactgaccagtcatagcattccccaggaataagttatgataattgagcgcgtgaatattacgctcactatcaattcttgggaataattattcagctcttttgcgtaattctgaagagcttaaaatcgtcacgccttcatgctcaggccgcatcgactctgccagcatgacccgcgccacgtctctcgcatcaatggatttccagttacctggtaacaaacggaacagcggcgcaaaaagcgtttcgttcatccgctgtttgctacgatcgcccagtaacatcgacgggcgagcaatggtcaatttcggccagttctgggcgattaatgcttcttccatctcccctttgacgcggttatagaaaaacggcgagtgggcattggcacccatcgcactgactaccaacatatgctgcgcgcccagtcgccgcccggttaatgcggtatccactaccagcgtgtaatcggcatgaataaacgcctctttgctccccgcttctcgccgcgtggtgccgagacaacaaaacacaatgtcgatgggatcggtgacctgcgccaacgcgtcactcagttgcggatcatggggattaaacaccccgggcatatcgcccaacggacgtcgcgtcggcgcagcaatggcgttaactttcggttcgttaatcaacatccgcagcaggtgaccgcccaccagccccgttgcgcctgtaatcagtacctgactcatcttcgctcctttacagaattgtctgccttgcgctccacggctcatgcaccaggcttaatagaccatgaggtaattatccccgattgtgggaaattcgcctcatccaatgcaacaacgcggaggaagcatgagtaagaaaattgccgttttaatcactgatgaatttgaggattcagaatttacttcacccgcagacgagttccgtaaagccggacacgaagtgattaccattgaaaaacaagcgggtaaaacggtgaaaggcaaaaaaggagaagccagcgtgaccatcgataaatccatcgatgaagtgacgcctgcggagtttgatgccctgctgctaccgggcggccattcaccggattatctgcgtggggacaaccgttttgtcacctttacccgtgattttgtgaatagtggcaaaccggtgtttgccatctgtcacggcccgcagttgctgatcagcgccgatgtgattcgggggcgcaaactgaccgcagttaaaccgatcattattgatgttaaaaatgcgggcgcggaattttacgatcaggaagtcgtggttgataaagatcagctggttaccagccggacaccggacgatctgccagcgtttaaccgcgaggcgttacgcctgctcggtgcctgagtcgcgtagccaaatcatttttttaccaaagcccagcgtgttgtcggtgaatttgatttcatcgagccggatttcccacaccggggccgacagcattctggcaaccggaaagcgacgattgtacgccttgcgcgcgaggtcgctttcctcaccttccagcctgcggatctcacctttaaactgcacaccgcgaattaacgctaccgttttcggctgaccgtttaccgttccggcaaccgcagcctgcggcccactcatctgcgcgtggcgcgttttttcttccgtcaaaatgtagaaggcgactttctgcgcatcaaaaagataaaaggcattagcgcaccagagttccccttcctgctgcacacaccaagtgacaacatgttgttttgccagccaacggctgatggcgatgagtgtttccattgctgttctcttttatactgtgggcctgaccttaacatgcgacgcagacgatgacaccctggtttctttacttgatccgtaccgccgacaataagctttataccgggatcaccacggatgtcgaacgccgctatcagcagcaccaaagcggcaaaggggcgaaagcactgcgcgggaaaggagaactaacgctggtgttttccgcgccagtgggcgatcgttcgctggcgttacgggcggaatatcgcgttaagcaactgaccaaacggcaaaaagagcgtctggtagcggaaggcgcagggtttgcagagctgttaagcagtctgcaaaccccggagattaaaagcgattgaaatgctcgtgatactcaaccaggccggtaacgccattcagcgcgtcatccgctaaacgatgtacctggaaggcgctttcagtgcccggccagcggcaacgcagatcgtgatgcgccgccagttcaaagccgaaacgactgtacagcgccggatcgcccagcgtcaccactgcggcatagccgaactcattaagcgaatcgagtccttcatagaccagttggcgtgccagcccctgtccacggtatttttcatcaaccgccaacggtgccatgccgacccattgcaggtcttcgccctgcacatcaaccggactaaatgccacatagccaatgacctgaccttcgtcatctgtcgccaccagccccagcgtcagaaagccatcttcacgcagatcgtgaaccagcttcgcttccgcatcactttcgaatgagcgacgcagcagggcatcaatacccggcgcatcaatgggaatttctactcgaattagcatggttcacctaccgatgtctgtttggtttcaggcgcggttttcattcccgcctcaacaaaatccgccagttgcagcagcatcatgcgtaaggctttcggcatttgctccagttcaatggcgtccatcaggtttttcacatacagccccagctccgtatcgccttcaatcaccagccgacgctggaagaagagcgtatccggatcttgtttacgcgccgcaatcatcagcagatcgctggcgtcggcactaaaactcacatcagcttgcgcgttctggctaacgaccagtttgccattcaccaccgaggtaaaccattgcaggtcaatatcacgcacatgaatacttaaccagcggccttcaagaaactccagctcgccatcatccagcgcctggcggaattgccagcttaagacctgctcaagaacctggcgttttagcgcaaatggcgtcagttttaccggtacactcaacagagatggccccaaatgcacaatacgggaacgcagtttatccaacacgagttttactccctgtttcaacaatcatcctattttgccatatcagaaaaataacatagcggtataaatcaacaattccatatgaaattgctgctaccaccaatacaactttaactgccttaaatcaaaaattgtcgcagcaaggttaactaaaatcccagttcgttaacatttttgcgttttgatagcgcaaccttcaggaaaaattatggagctgctctgccctgccggaaatctcccggcgcttaaggcggccatcgaaaacggcgcagatgctgtttatatcgggctaaaagatgataccaatgcccgtcacttcgccggccttaactttaccgagaaaaaattgcaggaagcggtgagttttgtccatcaacatcgccgcaaacttcacatcgcgattaacacttttgcgcatccggacggttacgcccgttggcagcgcgccgtggatatggcggcgcagctgggtgccgacgcgctgatcctcgccgacctcgccatgctggagtacgccgccgagcgttatccgcatattgagcgccacgtatcggtgcaggcttcggcgaccaatgaagaggcgattaacttttatcatcgccattttgacgttgctcgcgtggtgctgccgcgcgtgttgtcgattcatcaggtgaaacaactggcacgggtcacacctgtaccactggaagtctttgctttcggcagcctgtgcattatgtcggaaggtcgttgctatctgtcgtcgtatctgacgggtgagtcgcccaacaccataggcgcgtgttctccggcccgtttcgtgcgctggcaacaaacgccgcaggggctggaatcccgcctgaacgaagtgctgatcgaccgttatcaggacggcgaaaacgcaggttatccgacgctatgtaaagggcgttatctggtggacggcgagcgctatcacgcgctggaagaaccaaccagtctcaataccctggaactgctgccggagttaatggcggcgaatattgcttcggtgaaaattgaaggccgccagcgtagcccggcgtatgtcagccaggtggcgaaagtctggcgtcaggctatcgaccgttgtaaggccgatccgcaaaactttgtaccgcaaagcgcgtggatggagacgctcgggtcgatgtccgaaggcacgcaaaccactcttggcgcatatcaccgtaaatggcagtgagaaaagcaatgaaatattccttagggccagtgctgtggtactggccaaaagagacgctggaagaattttatcagcaggccgccaccagcagcgccgacgtgatttatcttggtgaagcggtatgcagcaagcgtcgggcaaccaaagttggcgactggctggagatggcaaaatcgctcgccgggagtggtaagcagattgtgctctccacgctggcgctggtgcaggcatcatctgaactgggcgaactgaaacgctatgttgagaacggtgagtttctgattgaagccagcgatctcggcgtggtgaatatgtgcgctgaacgcaaactgccgttcgtcgccgggcacgcgctgaactgctacaacgcggtgacactgaaaatattgctcaaacagggcatgatgcgctggtgtatgccagtggagctttcccgcgactggctggtgaatctgcttaatcagtgcgatgagctgggcattcgtaaccagtttgaagtggaagtcctgagctacggtcatctgccgctggcctactccgcccgctgctttaccgcgcgttcggaagaccgcccgaaagatgagtgtgaaacctgctgcattaagtatccgaacgggcgcaacgtgctgtcgcaggaaaaccaacaagtgtttgtactcaatggcattcagaccatgagcggctacgtttacaacctcggtaacgagctggcatccatgcagggcctggttgatgtggtccgcctgtcaccgcagggtactgacactttcgcgatgctcgacgccttccgcgctaatgaaaatggcgctgcaccactgccgttgacggcgaacagcgactgtaacggctactggcggcggctggcaggactggagctgcaagcctaagtaaatagctcactttgttaacaactttaactactctttaatgcagtattaaagattaatcggtaacaaagtgagctgttatgactgataaaaccattgcgttttcgctactcgatctggcccccattcccgaaggttcttcagcgcgagaagcattctcccactctctcgatctcgcccgtctggctgaaaagcgcggctatcatcgctactggctggcagaacaccacaatatgactggcattgccagtgctgccacgtcggtattgatcggctatctggcggcgaataccaccacgctgcatctggggtctggcggcgtgatgttgcctaaccactcaccgttggtcattgcagaacagttcggcacgcttaatacactctatccggggcgaatcgatttggggctgggtcgtgctccgggtagtgaccaacggacaatgatggcgctacgtcgtcatatgagcggcgatattgataatttcccccgcgatgtggcggagctggtggactggtttgacgcccgcgatcccaatccgcatgtgcgcccggtaccaggctatggcgagaaaatccccgtgtggttgttaggctccagcctttacagcgcgcaactggcggcgcagcttggtctgccgtttgcgtttgcctcacacttcgcgccggatatgctgttccaggcgctgcatctttatcgcagcaacttcaaaccgtcagcacggctggaaaaaccatacgcgatggtgtgcatcaatattatcgccgccgacagcaaccgcgacgctgaatttctgtttacctcaatgcagcaagcctttgtgaagctgcgccgtggcgaaaccgggcaactgccgccgccgattcaaaatatggatcagttctggtcaccgtctgagcagtatggcgtgcagcaggcgctgagtatgtcgttggtaggtgataaagcgaaagtgcgtcatggcttgcagtcgatcctgcgcgaaaccgacgccgatgagattatggtcaacgggcagattttcgaccaccaggcgcggctgcattcgtttgagctggcgatggatgttaaggaagagttgttgggatagtgtgtcttaacgcgggaagccttatccgagctggcaacgctgtcctacatagacctgataagcgaagcgcatcaggcattgtgtaggcagcagaaatgtcggataaggcaccgctgattactgatacaccggcagtaaattaaagctcgataaaatatgcaccagtgcgttgccgacgccaaacaccagaatcagcgcaatcatcggcttgccaccccagacgcggaatttcgggctgccaaagcgtttacgcgatgcacgggctaacagcgccggaacaattgccgcccagatggtagccgctaaaccagcataaccaatggcgtacaggaatccgttcgggaacaacagcccccccacaactggcggggcaaaggtcagcaatgccgttttcaagcggcccacagccgagtcgtcgaaaccaaacagatctgccagatagtcaaacaaacccagcgttacgccgaggaacgaactcgctaccgcaaagtttgagaacacgaccagcagcagatccagactacggctgttcagtacgccgcttaacgcctgtaccagcacatcaatattaccgcccttctctgcaataccgataaactccggacgcgggatgttacccatcgtcgccagcaaccagatggtatacagcgccagcgccatcagcgtaccgtacaccagacatttcacgatggttttcggatctttgccgtaatacttcatcaggcttggcacgttaccgtgataaccaaacgatgccagacagaacggcagggtcatcaacagatacggtgcataagacgcattgctttcggcgacgttgaacaatgtcgcaggctgcacatgccccagcaggctaccaaaggtgaggaagaaggtaatgactttcgcccccagcacaatcgctgtcatgcgactgacggctttagtgctcaaccacaccacaaacgctaccagcaatgcaaaaccaaaacccgccgcccgtgccgggacgtttagtgacatctctgcgaaggtgtgatgcagaatcgaaccactggcagaaatataggcataggtcaggatatagagcacaaaggcaatggaaatgccgttgaccacgttccagcctttgcccagcaaatctttggtgatggtgtcaaaactcgaaccgattctgtaattcaggttagcttccagaatcatcaagccggaatgcagcatacagaaccaggtaaagatcagcgccgccattgaccagaaaaaccacgccccggacatgaccactggcagagaaaacatccctgcgccaataatggtgccgccgataatcaccacgccgccaagcagcgacggtgacgtttgggtggtggttagtgttgccatgagggcttctctccagtgaaaaatagtgcgactgcgttgttatgcattgcactgtaccagtacacgagtacaaaagacagaaaaaaagccccgatggtaaaaatcggggctgtatatattattttacagattgtgttcgctgttcagcgatgattacgcatcaccaccgaaacgacgacgaccggtagaatcatcacgacgcggagcgcggccttcacgacgttcgccgctaaaacgacgaccatcaccacggccaccttcacggcgttcaccgctgaagttacgaccgccttcacgacgttcgccaccgaaaccacgaccaccgccacgacgctcaccgccagtatgcggctgtgcatcgcccagtaactgcatgttcatcggcttgttgagaatgcgagtgcgcgtaaagtgttgcagcacttcacccggcatacctttcggcagttcgatggtggagtgagaagcaaacagcttgatgttaccaatgtaacggctgctgatgtcgccttcgttagcaatcgcaccaacgatatgacgaacttcaacaccatcatcgcggcccacttcaatgcggtacagctgcatatcgccaacatcacgacgttcacgacgcggacgatcttcacggtcaccacgcgggccacggtcgttacgatcgcgcggaccacggtcatcacggtcacggaattcacgtttcggacgcatcggcgcatctggcggtacgatcagagtacgttcaccctgtgccattttcagcagtgccgcagccagagtttcgagatccagctcttcaccttcagcagtcggctgaattttgctcagcagtgcgcggtattgatccagatcgctgctttccagctgctgctgtactttagcggcgaatttttccagacggcgtttgcctagcagttctgcgttcggcagttctacttccggaatagtcagcttcatagtacgttcaatgttgcgcagcagacgacgctcgcggttctcaacgaacagcagcgcgcggccagcacgacccgcacgaccggtacgaccgatacggtgaacgtaagactcagaatccatcgggatatcgtagttaactaccaggctgatacgctcaacgtccaggccacgggctgcaacgtcggtcgcaatcaggatgtccagacgaccatctttcaggcgttccagtgtctgttcacgcagcgcctggttcatgtcaccgttcagcgcggcgctgttgtagccgttacgctcaagagcttcagccacttccagagtcgcgtttttggtacgaacgaagataatcgccgcatcaaaatcttccgcttccaggaaacgtaccagtgcttcgtttttgcgcataccccagacagtccagtagctctggctgatgtcaggacgggtagtcacgctggactgaatgcgcacttcctgcggctctttcataaagcggcgggtaatgcgacgaatcgcttccggcatggttgcagagaacagagcggtctgatgaccttccgggatctgcgccataatggtttcaacgtcttcgatgaagcccatgcgcagcatttcgtcagcttcatccagaaccagaccgctcagtttagagaggtccagagtgccacgtttcaggtggtccagcagacggcccggagtaccgacaacgatctgcggcccctgacgcagggcgcgtaattgcacgtcataacgctggccgccgtacagagcaaccacatttacgccgcgcatgtgtttagagaaatccgtcattgcttcagcaacctgtaccgccagttcgcgggtcggtgccagcaccagaatctgtggtgctttcagctcaggatcaagattctgcaacagaggtaaagagaatgctgcagtttttccgctccccgtctgggccatacccagaacgtcgcggccattcagcagatgtggaatacactctgcctgaattggagatggtttttcgtaacccagatcgttaagggcttcaaggataggagccttcaggcccagatctgcaaaagtggtttcgaattcagccatgtagtacgtgtgcctcaaaattaatggcggccagtctacataactcatcatgaaattgatcagcaattttcattgaaaagtgtgaaccggctcaaagtaggtgtattaacgaacaacaacgccctcacccgttaaggtgatggcaatcaaaaaagattacgggctgatgtgtacgtcagctattgctggtccgattctgccaggtcatcttggtcctggcccaggagcgataattccaacaatgcgtatcggtgctcaacaaagttatgaacgttgttggcaaccgccagtttgaacagtgccgtggcgctgtccaaatcccccagacttaggtagtacttacctaaatagaagttggtttcactgagatgctcagcgagcgaggtgttatccgttgcgtccgccttgagcctttccattaacgtttgttcgctaatgttgcccaggtagaactcgacaatgttccatccccactgttccttatccgatttttcgaagtgctgtttcaacacttctttagcctgcttctcatcgagcttctgctcggcgagataaagccacagactacggaaaggatcattgggatcgtcttgataaaacgccagcagatcatcttgcgctaacttgtcacgaccgccgtaatataatgcgatcccgcgattcaagtgcgcgtagttgtaagttggatcaagctcaagtacagaatcaaacgcttcataggcagcatcaaaattgcctgcctgcgttaaatatatgcctaagtaattgaatacttcaggcatatccggtcggattgccagcgcttgcgaaaaatcgttacgcgctaatgccctcagaccgagactatcatacaacactccgcgctcatataaaagctgtgcgcgttcgtcatcggttaaagcccgactggcaaggatttgttccatacgtgccagaatcacttcctgctgtaaagtcggttgcaatggtaccgcgaggacttcacttttacgccaggaagtattactgcatcctgcaagcgtaagtgctgtcgcaacgaaacaccagcgcaaaaaaggcttcatttcccactcccgaagaccacggttgaatgaacgtcctgttcccggttgctaacaaggcgtcctgcccggttaaaagccccccgccgcagcggagggcaaatggcaaccttactcgccctgttcagcagccggagcttccggtgctgcagcaggttgagactgctcagtcgcttctttaatgctcagacggatacggccctggcgatcaacttccagaactttcaccggtacttcctgacccatctgcaggtaatcggtcactttctcaacgcgtttgtcagcgatttgagagatgtggaccagaccttctttaccgccgccgatggcaacaaatgcgccaaagtcaacgatacgggtcactttaccagtgtagacgcggcccacttcgatttctgcagtgatctcttcgatacgacgaatagcatgtttcgctttctcgccgtcggtcgctgcaatcttcacagtaccgtcatcttcgatttcgatggtggtgccagtttcttcggtcagagcacggattacagaaccgcctttaccgataacatctttgatcttgtccgggttgatcttgatggtatggatacgcggtgcgaactcagagatatcgccacgcggcgcgttgatcgcctgttccattacgcccaggatatgcagacgcgcacctttagcctggttcagcgcaacctgcatgatctctttggtgataccttcaattttgatatccatctgcagtgcagagataccgtcgcgggaacctgcaactttgaagtccatatcgcccaggtgatcttcgtcgcccaaaatgtcagacagtacaacgtagttgtcgccttctttcaccagacccattgcgatacccgcaacggcagctttgatcggcacacctgcgtccatcagcgccagagacgcgccgcacacggaagccatagaagaggaaccgttggattcagtgatttcagacacaacacgtacggtgtacgggaatttgtccatatccggcatgactgccagcacgccgcgcttcgccagacgaccgtgaccaatttcacgacgcttcggagaaccgaccatgccggtttcgcctacggagtacggagggaagttgtagtggaacaggaaggtatcggtacgttcgcccatcagttcatcaagaacctgcgcgtcacgagcagtacccagcgttgcggtaaccagcgcctgcgtttcaccacgggtgaacagcgcagaaccgtgagtacgcggcagcacgccagtacgcacatccagaccacggatcatatctttttcacgaccgtcgatacgcggttcgcctgccagtacgcggctacgaacaacgtttttctcgatcgcgtgcagaatttcacccagttcgttttcgtccagggtttcgtcttcagcaagcagcgtcgcgatggtttcagatttgatgacatcaacctgcgcataacgctcttgtttgtcggtgatgcggtaagcatcgctcaggcgagcttcagccagtgcagcaacgcgcgcgtttagcgcttcgtttaccggctccggctgccagtcccaacgcggtttaccggcttctttcaccagttcattgatgttctgaataacaacctgctgttgttcatgaccgaacactactgcgcccagcatctggtcttcgctcagcagttgagcttcagattcaaccatcagtacagcggcttcagtaccggcaacaaccagatccagtttgctctctttcagctcgtcctgagtcgggttcagtacgtactggtcattgatgtaacctacgcgggcagcaccaatcgggccattgaacggaataccagacagagacagcgctgcggaagcaccaatcatcgcgacgatatccgggttaacttgcgggttaacagaaaccacggtggcgataacctgaacttcgttgacgaagccttccgggaacagcgggcgaatcgggcggtcaatcagacgcgcgatcagggtttcgccttcgcttgggcggccttcacgacggaagaagctacccgggatacgaccagcagcgtaggtacgctcctgatagttaacggtcagtgggaagaagtcctgacctggtttggcttttttctggccaacaacggtaacgaataccgcggtgtcatccatgctaaccataacagcggcagtagcctgacgagccatcatgccggtttccagagtcacggtgtgttggccgtactggaatttacgaacgatcggattaagcaatgtaatatcctttctctttcttagacagtaccttacggcactggtgttaatacccgatcttctgcgcatcctcgcgactaatgacaaccctaacccagctctatgtgggtaaagcctctcattagccgcgcgaacctctgcaacggaagatcattcatagcaacaatacattagtttccagtgaattgctgccgtcagcttgaaaaaaggggccactcaggcccccttttctgaaactcgcaagaattagcgacgcagacccaggcgctcgatgagctgggtgtaacgtgctacgtctttacgtttcaggtagtcgagcagtttacgacgctgagaaaccatgcgcagcagaccacgacggctgtggtgatcttttttgtgctctgcaaagtggccctgcaggtggttgatctgtgcagtcagcagtgctacctgaacttcggtagaaccggtgtcgtttgcgtcacgaccaaactcagaaacgattttagctgttgcttcagtacttagagacattttaaaactccaaagtatatagaatgaaaggacgccgatctctaattcagcgatcccagtgtacgttacgcaaagtgttaaacaatttacgcgacgttaagcggcagtattctactcgtagcgacctgttatcgcaagacggttaacattacgccgggtattcaaccaccaggcgacgaggcgcaacgcggccttcatcgtcaatttcgcccataccgataaatttgccgttctcaccttccgtgacgcgaaccagtccttccagtggcgcaccagatgtacgaaccgggttaccatttttgaagtaaacagaagacgttaacggaagattcaccaccggatagtccgaagctggactgtccattggcatcagtaatggatcaagtaactccgcggctggaatatcctgctgttcagcttgctcaacaagttcacgcaggtgctccagggtcaccatccgttcaaccggatatttacttaccgccagacggcgcaggtaaataacatgcgcgccacagccgagtttttcacccaggtcatcaatgatggtgcggatataagtgccttttgagcagtgaatttccagctccagctcattgccttcatggcgaataaacagcaattcataaacggtaatcggacgcgcttcacgcggaacttcaatgccctgacgcgcatattcgtacagttttttgccctgatatttcagtgctgaatacatcgaagggatctgttcgatatcgccacggaaagtatccagtgccgctgccagctgctctgcgctaaaggttaccggacgttcttcaacgatctgtccgtcggcatcagaagtatcggtacgctgtccaagacgcgcaatgacccgatagcgtttgtcggagtccagcagatactgggaaaacttcgtcgcttccccgaggcaaatcggcaacatgccggtcgccagcgggtccagcgcaccggtatgcccggcacggttggcgttatatatacgtttcactttttgcagcgcatcgttgctggacataccctgaggtttatccagcaacaaaacgccgttaatgtcgcgaccgcgacgacgaggacgactcattagtcctccttgctgtcgtccgggttaacacgacgttcttcgtcatgtttgaccacgctggtcaccaggtttgacatgcgcatcccttcaaccagagagttgtcgtagaagaaggtcagttccggcacgatacgcaggcgcatcgctttccccagcaggctgcggatgaaaccagaagcttcttgcaacgctttgatgcccgctttaaccgcgtcttcatctttgtcgttgaggaacgtcacatatactttggcatacgccaggtcgcgagacatttcgacaccggaaacggtggtcatcatgcccaggcgaggatctttaatttcacgctgcaggatgagagcgatctctttttgcatttcctgcgctacgcgctgcgggcgaccaaattctttcgccataataaattctcctgacaaaaaaggggctgttagcccctttttaaaattaatttcaggtggaagggctgttcacgttgacctgataagacgcgccagcgtcacatcaggcaatccatgccggatgcagcgtaaacgccttatcccgcatggaaccctaaaaaccttaagcaatggtacgttggatctcgatgatttcgaatacttcgatcacatcgccagtgcggacgtcgttgtagttcttaacgccgataccacattccataccgttacggacttcgttaacgtcatctttgaagcggcgcagggactccagctcgccttcgtagataaccacgttgtcacgcagaacgcggatcgggttgtgacgtttaaccacaccttcggtaaccatacagcctgcgatggcaccaaatttcggcgatttgaacacgtcacgaacttccgccagaccgataatctgctgtttcagttccggagacagcataccgctcatcgccgctttcacttcgtcaatcaggttatagatgacggagtagtaacgcagatccaggctttccgcttcaatcactttacgtgcagaggcatcagcacgtacgttaaagccaaccaggatggcgttggacgccgcagccagggtggcgtcggtttcggtgataccacctacgccagaaccgatgatcttcactttaacttcgtcagtagacagtttcagcaaggagtcggagatcgcttcgacagaaccctgtacgtctgccttcaggacgatattcacttcgtgaacttcgccttcggtcatgttggcgaacatgttctcgagtttagatttctgctgacgcgccagtttaacttcgcggaatttaccctgacgatagagtgcaacttcacgcgctttcttctcgtcacgtacaacggtaacttcatcacccgcagccggtacgccggacaggccgaggatttccaccggaatggacggacccgcttccagcacttcctgacccagttcgttacgcatcgcacgaacacgaccgtattcgaagccacacagaacgatatcgcccttgtgcagagtaccttcacgtaccagaacggtagcaaccggaccacgacctttatcgaggaaggattcgataaccgcaccgctcgccatacctttacgtaccgctttcagctccagaacttccgcctgcagcaggatagcgtccagcagttcatcgataccggtacccgctttcgcagatacgtgtacgaactggctttcaccgccccactcttccggcaggatgccgtactgggagagttcgttcttaacgcgatccggatcagcttctggtttatcgatcttgttcactgcaaccaccaccggtacctgcgccgctttcgcgtgctggattgcttcgatggtctgcggcatcacaccgtcgtcggcagcaacaaccaggactacgatgtccgttgcctgcgcaccacgagcacgcattgaagtaaacgcggcgtgccccggggtgtccaggaaggtgatcatgccgttttcagtttcaacgtggtatgcaccaatgtgctgggtaatgccgcccgcttcgccagaggccactttcgttgaacgaatgtagtccagcagagaggttttaccgtggtcaacgtgacccatgatggtcacaaccggcgcgcgcggttcagccgcagcacccgtgtcacggtcgctcattaccgcctcttccagctcgttttcacgacgcaggataactttatggcccatctcttcagcaaccagctgtgcggtttcctgatcgataacctggttgatggttgccattgcgcccagtttcatcatcgctttgatgacctgagagcctttaaccgccatcttgttcgccagttcgccaacggtgatagtttcgccgatcacaacgtcacggttaacggcctgagcaggcttctggaagccttgctgcagcgaagaacctttacgttttccgcctttaccgccacgtactgctgcgcgtgcttcttcacgatcagcttttgattcagcgtgtttgttgcctttcttcggacgcgctgctttcgcgttacgaccacggccacggccgccttcgacttcacgatcgctttcgtcttctgcctggcgagcatgttgagaagtagtgacgtgataatcgctggaatcttcagtcggttccgcgttatcagtccatttgttttcttccgccatacgacgtgcttcttcagcaacgcgacgtgcttcttcttcgagtttacgacgcgcttcttcttcagctttacgcttgagctctgcagcttcctgctcacggcgggctttttcagcctgggcgtttttagtcatatcgtcttgttgattgctcactttgtctttttccgcagcttcacgtttcgcttgttcagcagcttcacgcttagcttgttctgcggcctcacgttcagctttttgttgcgcctcgcgtttagccgattcttctgcctcacgacgggcttgctcttccgcttcacgctgcgcttgctcttccgctgcaaggcgttcagcctcttgcggatcgcgtttcacaaaggtgcgtttcttgcggacttcgatttgtaccgatttgctttttccaccggtaccaggaatgttaagggtgctgcgtgttttacgttgcagcgtcaatttgtccgggcctgaatttttctgattcaggtggtcaatcaaagtctgtttctcttgtgcagacacagagtcgtcagcagacttccggatacctgcatcagcaaattgctgtaccaggcgttccacggaggtctgtcgctctgcggccagcgttttaatcgttacatctgtcatgctgttccttcctgctacagtttattacgcttcgtcaccgaaccagcaaatattacgggcagccataatcagtgctccggctttttcgtcggtcaacccttcgatatcagccagatcatcaatgccctgttcggcgagatcttccagcgtacaaacgccacgggcggccagtttgaatgccaaatcacgatctaccccttcaaggttcagcagatcgtcagccggtttgttatcaccgaggctttcttcctgggcctgtgcaatggtggccagtgcatttttagcacgctcgcgcagtgcttcaacggtcggctcatcaaggccttcgatttccaacagctctttcatcggcacataggccaattcttccagcgtcgagaagccttcttctaccagaacagtcgcgaagtcttcgtcgatgtcgagatatttggtgaaggtgtcgatcgctgcgtgcgcttccgcctgatgcttagcctgcaggtcgtcaacggtcatcacgttgagttcccaaccgctcagctgcgaagccagacgcacgttctgaccgttacggccaatcgcctgcgccaggttaccggcttcaacggcgatatccatggtgtgtttatcttcatccaccacgatagaagcaacgtctgccggtgccattgcgttaatcacgaactgcgccgggttatcatcccacaggacgatatcgatacgctcgccacccagttcagtagacaccgcctgaacacgcgcgccacgcatacctacgcaagcacctaccggatcgatacgtttatcgttggttttcaccgcgattttcgcacgagaacccggatcgcgagccgctgctttaatttcaatcacttcttcgccgatttctggcacttcaatacggaacagttcgatcagcatttccggcttggaacgagtgacgaacagttgcgcgccacgcgcttccgggcgaacggaatagagcacgccacgaacgcggtcgccagggcggaagttttcacgcggcagcatatcttcgcgcaggatcacggcttcagcgttgttgcccagatccagagagatgttgtcgcggtttacttttttcaccacgccggtgatgatttcaccttcgtgttcacggaactgatcaaccaccatcgcacgttcggcttcacgcactttctgcacgataacctgttttgccgtctgggtagtgatacggtcaaaggtaacagactcaatctgatcttcaacgtaatcgcccaggttcaggctttcatcttcataacgtgcggcttcaagggtgatttccttggtcggctgggtgacttcatcaacaactaaccagcgacggaaagtgtcaaaatcaccgcttttgcgatcgatctgtacgcggacgtcgatctcttgttcatattttttctttgttgctgtcgccagcgcgctttccaatgcttcgaaaatcttctcgcgaggtagcgccttttcattggatacggcttcaactacagccaaaatttctttgttcatcgcgggcttttcacctcatccagactattaaaagtggggaaccaggttcgccttctggatattactcagcgcgaacacttcatctttaccttcgacggtaactgtgatcatttcaccgtctaccgctttgataacgccctgccatttacgacggttttgtaccgccatacggagaaccagagtcacctcttctccgacaaaacgggcgtagtgttcagccgtgaacagtgggcgatcgagacccggtgaggagacttccaggttataagcaacggtgatgggatcttcaacatccagcacagcacttacctggtggctcacatcagcacaatcatcaacattgatgccatcttcactatcaatatagatgcgcagtgtggatgtgcgaccgcgaataaattcgatgccaaccagttcaaaacccagggcctcaactggcgcagtaatcatctctgttaatttttgctctaatgtggacaagcccacccccaagacataaaaaaagggcctaaagcccagttattctgtagtcagataacaaaaaaccccgataaatcggggctttatataactgaaccctataaccgcaactgcggtctggagcactttccagaaggattttttcaaatcccactacgaaggccgaagtcttcacagtatatttgaaaaaggactctaagggaaagtggttgcgggggccggatttgaaccgacgatcttcgggttatgagcccgacgagctaccaggctgctccaccccgcgcctgaaacgtggcaaattctactcgttttgggtaaaaaatgcaaatactgctgggatttggtgtaccgagacgggacgtaaaatctgcaggcattatagtgatccacgccacattttgtcaacgtttattgctaatcatgtgaatgaatatccagttcactttcatttgttgaatacttttgccttctcctgctctcccttaagcgcattattttacaaaaaacacactaaactcttcctgtctccgataaaagatgattaaatgaaaactcatttattttgcataaaaattcagtgagagcggaaatccaggctcatcatcagttaattaagcagggtgttattttatgacgacgattctcaagcatctcccggtaggtcaacgtattggtatcgctttttctggcggtctggacaccagtgccgcactgctgtggatgcgacaaaagggagcggttccttatgcatatactgcaaacctgggccagccagacgaagaggattatgatgcgatccctcgtcgtgccatggaatacggcgcggagaacgcacgtctgatcgactgccgcaaacaactggtggccgaaggtattgccgctattcagtgtggcgcatttcataacaccaccggcggcctgacctatttcaacacgacgccgctgggccgcgccgtgactggtaccatgctggttgctgcgatgaaagaagatggcgtgaatatctggggtgacggtagcacctacaaaggaaacgatatcgaacgtttctatcgttatggtctgctgaccaatgctgaactgcagatttacaaaccgtggcttgatactgactttattgatgaactgggcggccgtcatgagatgtctgaatttatgattgcctgcggtttcgactacaaaatgtctgtcgaaaaagcctactccacagactccaacatgcttggtgcaacgcatgaagcgaaggatctggaatacctcaactccagcgtcaaaatcgtcaacccgattatgggcgtgaaattctgggatgagagcgtgaagatcccggcagaagaagtcacagtacgctttgaacaaggtcatccggtggcgctgaacggtaaaacctttagcgacgacgtagaaatgatgctggaagctaaccgcatcggcggtcgtcacggcctgggcatgagcgaccagattgaaaaccgtatcatcgaagcgaaaagccgtggtatttacgaagctccggggatggcactgctgcacattgcgtatgaacgcctgttgaccggtattcacaacgaagacaccattgagcagtatcacgcgcatggtcgtcagttgggccgtctgctgtaccaggggcgttggtttgactcccaggcgctgatgctgcgtgactctctgcaacgctgggttgccagccagatcactggtgaagttaccctggagctgcgccgtgggaacgattattcaatcctgaataccgtctcagagaacctgacctacaagccagagcgtctgacgatggaaaaaggcgactcggtgttctcgccagatgatcgtattggtcaattgaccatgcgtaacctggatatcactgatacccgcgagaaacttttcggttatgccaaaactggcctgctttcctcctctgccgcttcaggcgtgccgcaggtggagaatctggaaaacaaaggccagtaattcgacatcaaccctgcccttcaggggtggggttaccttgcttatcctctgtaaactcctttctgagcatcacataatcgaaaacatcatggtttgcatccacaacccgtgagtctcctttatagtgtgcaatcacttcctcaagcgtttgcggctgttccggctttgttacccccatccacgcattaataaggtaattattgtaagctgtcgaaaagatgttgttttccgttgtgcgatccacgccatccccaagaacggggctataccagataaacatcgggacatgatatgcctgctggctagcctccctgcctccatgaaaatagacgttcttcttcgtagggtcacgttccaggccgtggtcggcaaaatacatgaccgaggcgcggcgatcttttaataattcaaaaacctgacctagcaaactatctgtgtaatgaatggagttgtcatagcaggcatcctgatcgtcctgcggttgaaacacggcgctggattgcggataggcgctacaagccggttcatggcttccatttaaatgaagaacaatcagtttcttttgctgcgtattttgctgtaatgcttgcgataaatgcggcaacaacaattcatcaaatcctctgacataaactgtttccatggcgcgcatggcgatactggtaactgctgtaccattctgccgaaaagcggattgcgagcttagccagaaagtctgaaatcctgcttgattagccatattaataatgttgtcggggtaattatgaatgtcatgactcaaaacagaatcagcagttaaagaaaggggaaccgacagcgcagtgtaaggtgcgccgcttattgcttgattaaacagtttgatctgttttctttgtgcttcaacttgcggtgtcgtagagcgtgtatatccatacaaagacatattgtcgacacgtacagactcccccacaatcaacacgtaggtatcaatacctgtatccctgactgataattgaaaatacggcaccgtgtttgcaattgagagtaatctttgatgctctttcgctgctaaagcaaaatagttgagattgaaaaacggcgtataggtagcaaatcgcgacgctagtatatatggactgaacgcttttttattttttgcatctttataagcaaattgacaagcggaaaataaactgcccgaaatgacaatcagcaataatattcctgtcactttttttgtcggcaaggaaacatcatattttattattactgccaaaaaaagaagggataaaaaagcaaaggcacatagataagggatatacatccccagcattttgacaacttcatccggatcactctggagcacactaatcgcaaatccatcattgaaagttgtaccaaaggtacaccatgaatagaggctaatactcatgtctgccgcagtcagtaacacaaatggtgcggcaacaagcaggcgaagcggaagggatgatatacgttttacaaccaggatggtcagaacgaagaacagcaagcgctgaaccatatgcgctccggaagaagcgactaagttcgtaataccaaaaacaataacacaaagatacaacaaccaatgagatttaaaagttctagcaaatttgttgaatactgtcatccagaaatccaagttcacaaccaatataaacaattatcaacaatgtttaattttatatcagacatgtttttcaactctgatccatatcagaacgaaacactgttagttttttctttttaaatgatgcggccattgcgttctcagtaattaaataacattatcaatgcgtctctaaacattacgcagaacgtagccatcagtcgttatactgacaggagcaggatggtttatcgagaagtaaacatatccgtattcgtaccggaactggagttgacacaataaagtgccaattatgtcagtagaagggaaaaatttataactaaggcgtaccggcaccatcgtttcaaggtaccagctacgagtaaagcaactggacgagatacagatacctgacaaccattcctcagaccaggaccaaaacgaaaaaagacgcttttcagcgtctcttttctggaatttggtaccgaggacgggacttgaacccgtaagccctattgggcactaccacctcaaggtagcgtgtctaccaattccaccacctcggcacggatactactttttagttcgggatatcgctggtcggcttagccggagcagctggctgagtttgttcggttttcgccggtgcactcagattttcccattcgctacctttattggttttgttgctattgatgttacccagcaccagactgatgatgaagaataacgttgccagcagcgccgtcatgcgggtcatgaagttaccagaaccacttgaaccaaacagcgtagcggaagcgcctgctccgaaggaggctcccatatcagcgcctttaccttgctgcagcatgatcagaccaacaaggccaattgccacaataaggaaaactactaaaagagcttcatacataatcaacctgttccttgcggagttgccgcgtaccaatgcttcaaccaataaagcgggagtttttaatctttcccactgaagcgggtgtgaatactaaccaaagcgaatgaccttcgcaagggcaattttatcgcattgtatcaactgcggaaaaaaacagcaaaaccgatgtgttcgctgagaaaaaaggcgacaatcgccgcctttttagccagttatctaacgctttaaacggcttttactgcatcggcgatgcggtgtgcaaattcagtcacctgcgcttcgtcttcgccttccaccatcacgcgaattaacggttcggtgccggatttacgcagcaacacgcgtccacggttgcccagcgcagcttcaacctctgcggtcacggctttaactgactcatgctcaagtggatcgccgctacctgcggtgtaacgtacgttaaccagaatctgcgggaacattttcatgccgctgcaaaggtcgtgcaggctcatatggttacgtgccatcgccgccagcacctgcaagccagcaacgatgccgtcaccggtagtagttttatccagcaggatcacatgaccggaattctctgcaccgatacgccagcctttctcctgcattttttccagtacgtagcggtcacccactttcgcgcgcgcaaatggaattcctaactgtttcagcgccagttcaagccccatgttgctcatcaatgtacccacagcgccaccacgcagctggccctgacgaagaccttcacgcgcgatgatatacatgatctgatcgccatcgactttattgccttcatggtcaaccataatcacgcgatcgccatcgccgtcgaaggcaataccgagatccgctttttcagccagcacacgagcctggagcgcgcgaacgtcggtagcccccacttcggcattgatgtttacaccgtttggctcacaaccgatagcgataacgttcgcccccagttcgcgcagcacgttcggcgcgatgtgataagtcgcaccgtttgcacaatccaccacaatcttcagttcactgaggctaagttcgttcgggaacgtggctttgcaaaactcgatatagcgacccgcggcatcaacgatacggctggctttacccagttctgccgaatcaacgcagctgatctccttttccatttccgcttcgatggcctcttctaccgcatccggcagtttggtgccgtcgatagagaagaatttaatgccattatcgtagaacgggttatgcgatgcagatatcacaattccggcctctgcgcggaaggtacgcgtcagataagccacggccggtgttggcatcgggccagtgaagagtgcggaaaggcccgctgccgccagacccgcttccagtgctgactccagcatatagccagaaatacgcgtgtctttaccaataataatcttacgggagccgtggcgcgccagcactttacccgcggcccaacccagcttaagcacaaaatcaggtgtgatcggcgcatcccctacacgaccacgaatcccatcggtaccgaaatatttacgattactcatagcgtttgttttcctttgcagacagagtggcttccaccacccgcatcgcttctacggtttctttgacgtcatgaacacgaatgatgtgcgcgccttgcattgcggcaatgaccgcacaggccagactaccgctcaggcgctcggacggccccacgttcagcagctgcccaatcatcgattttcgtgacatacccaccaacagcggcaggttgaaatggtgaaattcagccaggcgcgccagtaatgaatagttatgggagagatttttaccgaaaccgaatccggggtcgagcaacaatttctcttttgcgatacccgcctgctcgcaacgtgctatttgctcaataaagtagcgattcacttctgcaaagacatcgtcatacttcggagcttcctgcatggtttttggatttccctgcatatgcatcagacaaaccggtaaaccggtttctgcagccgcctccagagcgccaggttcggaaagggagcggatatcattaataatgtgagcgccaactttcgctgactcacggatgacttctggtttggatgtatcgactgagatccagacttcgaagcgttgagcaattgcctcaaccacaggaataacacgttgcaactcttcttcaacgctaacttccgccgcccctgggcgcgtggactcgccaccaacgtcaatgatcgtcgcgccagcgttgatcatcagattcgcatgtttcaccgcatctatcagcgagttatgcgtgccaccatccgaaaaggaatcaggcgtgacgttgaggatccccattacgtgaggatggctaaggtccagtgaagtaccctgggcaaagagtttcatgatgttatccctggtatgaattgataagaaaaaaccccggagcacgccccggggttttcggtacaaatacagtcatctgatgcgggaacttacttgtcgcctaactgctctgacatggtgttacccgggttcggcgtacgcggttcatcaaccggacgaggagcctttggactaccattgtcgccagaattgttagaagcgcctggttcttcccagcccgctggcggacgtacatcgcgacgtgccatcaggtcatcaatctgcggtgcgtcgatagtctcatatttcatgagagcatctttcatcgcatgcagaatatccatattgtcggtcagaagctgacgcgcacgattatagttacgctcaatcagtgctttcacttcctggtcgatgatacgtgcagtttcatcggacatatgtttcgctttcgctacgctacggccgaggaacacttcaccttcttcttccgcgtacagcagtggacccaatttctcagagaagccccactgagtcaccatgttacgtgccaggttggtcgcaactttaatatcgttggacgcaccggtagatacatgttccggcccgtagatgatctcttctgccagacgaccaccgtacagcgtagaaatctggctttccagtttctgacggctggcgctgattgcgtcgccctcaggcaagaagaaagtcacacccagcgcacgaccgcgtgggataatcgtcactttgtgcaccggatcgtgttccggcaccaggcgaccgataatcgcatgacccgcttcgtggtaagccgtcgattctttctgcgcttccgtcatcaccatggagcgacgttccgcacccatcatgattttgtctttcgctttctcgaactcaaccatcgacacaacgcgtttgttgccacgagcagcgaacagtgccgcttcgttcaccaggttcgccaggtcagcaccggagaaaccaggagtaccacgggcaatgattgccgcgtcgatatcgggtgccaatggtacgcgacgcatgtgaactttcaggatctgctcacgaccgcgaacatctggcaagccgaccacaacctgacggtcgaaacggccaggacgcagcagggccgggtcgagaacgtccggacggttagtcgcggcgataacgatgataccttcgttaccttcgaagccatccatctcaaccagcatctggttcagagtctgttcacgttcatcgtgaccaccgcccagaccagcgccacgctggcggcctacggcgtcgatttcatcgataaagatgatgcacggtgccgctttcttcgcctgttcgaacatgtcacgaacacgggatgcacccacaccgacgaacatttctacgaagtcagaaccggagatagtaaagaacggaactttcgcttcgcctgcaatcgctttcgccagcagcgttttaccggtacccggaggaccgaccatcaagacgcctttcgggatcttaccgccgagtttctggaagcggctcggctcgcgcagatactcaaccagttcagcaacttcttcttttgcttcgtcgcagcccgcaacgtcagcaaaggtcgttttgatctgatcttccgtcagcatgcgcgctttgctcttaccaaacgacatggcacctttgccaccgccgccctgcatttgacgcatgaagaagatccagacaccaatcagcaacagcatcgggaaccaggagatgaagatagaagccagcaggcttggttcttcaggcggttcaccgacaaccttgacgttcttggtcaacaggttatccagtaatttcggatcctgaaccggaatgtaagtggtataacggttactatctttcttggtaacgttgatttcacgtccgttgatacgcgcttcacgaacctggtcgttattgacctcttgtaggaaggtagagtaatccaccttacggccattagactcgctgggcccaaagctctggaatactgacatcagcacaacggcaatgaccagccagagtattaggtttttcgccatgtcactcaagggattaacctcttattacaactgtgttaaaaacagcgtcaggatactctatatccagcatctttcaaactttcgtctgaaatctcccggttagggtttacgcccggtcgctacaatatacacttcccgcgaacgtgcacgagaagagtccggcttacgaactttgaccttcgtaaacagggagcgaatttcccttagatactcatcgaaaccttcgccctggaacaccttcactacaaaactgccacctggcgctaatacatcacgacacatttctagcgccagttccaccagatacatggcacgggggatatccaccgccggtgttccgctcatgtttggtgccatatcggacatgacaacctggactttgctgtcgccaacgcgctccagcagtgctttcatcaccagttcatcacgaaaatcgccctgaagaaagtccacaccaacgataggatccataggtaaaagatcgcaagcgatgatgcggcctttgccgccaatttgggtgaccacatattgtgaccaaccacccggagcagcaccaaggtcgacaaccgtcattcccggtttaaagagtttgtcactttgctgtatttcatcaagtttaaaccaggcacgggaacgtaacccctttttctgtgcctgttgaacatatttatcgctaaagtgttcctgaagccagcggctggagctggcagaacgcttcttacctgtcatttaactttcccatggggataactcatcgtaaccaattgcgtaaatttttacgcgcctatttggtgatatatgggagatggcggtagaatgacccgttttcaatcccaacgtaagcaaaaaatacgatgaatctgagtactaaacaaaaacagcacctgaaaggtctggcacatccgctcaagccagttgttctgcttggcagtaatggtttgaccgaaggggtgctggccgagattgaacaagcgttagagcaccatgaactcatcaaggtgaaaatcgccaccgaagatcgcgaaactaaaaccttgatcgtggaagctatcgtgcgcgaaaccggcgcctgtaatgtacaggtcatcggtaaaacgctggtgctttatcgcccaactaaagaacgtaaaatctcgctgccacgctaagattatcctaaagttacacacatttgctgtgtaaaacgaggggttttccgcaggcaggagagcaaaatgccacgctctgttcgttgataaaaggccgcatagcggcctttttcctttctttacaatacatcaacatcttgagtattgggtaattcttacaggtattccaccttaattacttcaaattctacttcgccgcccggcgttttgatgaccacaacatcatcttcttctttgccgatcaggccacgagcaataggcgagtttacagaaatcaggttttgtttaaagtcagcttcgtcatcgccaacgatgcgataagtctgttcttcgtcagaatccagattcagcaccgttacggtagcaccaaaaataacgcgcccattgttgggcattttggtgacatcaatcacctgcgcgttcgacagcttggcttcgatgtctttaatacggccttcgcagaaaccctgctgttcacgagctgcgtggtattcggcgttttctttcaggtcgccatgctcacgcgcttccgcgatagcagcaatgatttcaggacggcgcacagatttcagaaaatccagctcttcgcgtaatttttcagcgccgcgtaaggtcatcggaatagcttgcatttgttatacctcttgaatattcctgatagggcaagtcttcacccaccccggctgttcggcctgcccggcataactccttaccgggaccagaagcaaaaaaataccgacccgggtacaagtcccaggtcagctacaattcacattttgatagtcattttaccctgaagttcccgaagggtcatcgtttactttatagggcgttgcgccgtagtatgacggctcgattccaggttgttagcgcgagattatgcgattttccagatttatcatcggattgaccagctgtatagcgttcagtgttcaggccgcaaatgttgatgagtacattactcaactccccgctggtgccaaccttgccctgatggtgcaaaaagtcggcgcgtcggcccccgctattgattaccacagtcagcagatggcgctgcctgccagtacccagaaagtgattactgcgctggcggcgttgattcaactcggccccgattttcgttttaccacgacgcttgaaaccaaaggcaatgtggaaaacggcgtacttaagggtgacttagtggcgcgatttggtgccgatccgacgttaaaacgtcaggatattcgcaatatggtcgcgactttgaaaaaatctggcgtcaaccaaatcgatggcaatgtgttgatagatacctccattttcgccagccacgataaagcccccggctggccatggaatgacatgacacaatgctttagcgctccgcctgccgccgccatagttgaccgcaactgtttctccgtctcgctctacagtgccccaaagcctggtgatatggcttttatacgcgtggcatcttattaccccgttacgatgttcagccaggtacgcaccctcccccgtggttctgccgaagcgcaatactgcgaactggatgtggtgccaggcgacctgaaccgctttacgctgacgggatgcctgccacaacgttctgagccgctcccgttggcttttgccgtgcaggatggagccagctatgccggtgcaattctgaaagatgagttaaaacaggcgggtatcacctggagcggaacactgctgcgccagactcaggttaacgaacctggaacggtagttgccagtaaacagtcggccccgctgcacgatctgcttaagattatgctgaaaaagtcggacaacatgatcgccgatacggttttccgcatgataggccatgcgcgcttcaatgtgcctggaacatggcgggccgggtcggacgccgtgcgtcagatcctgcgccagcaagccggtgtcgatattggaaacaccattattgccgatggttcagggctttcgcggcataacctgattgcccccgccaccatgatgcaggtgctgcaatacattgcccaacacgacaatgaacttaactttatctccatgctgccgctggcgggctatgacggctctttgcagtaccgtgcaggtctgcatcaggcgggcgtggatggaaaagtctcagcgaaaaccggttcgttgcagggggtatataacctggcgggattcattaccacagcgagcgggcaacgaatggcgtttgtgcaatatctttctggctatgcagtagaacctgcggatcagcgtaatcgccgtattccgttagtgcgttttgaaagccgtttgtataaagatatttatcagaacaattagtcaaaaagaaaccccggcacatggccggggcttcagattattgacaaagtgcgctttgtttatgccggatgcggcgtaaacgccttatccggcctacaaaatcgtgcaaattcaacatattgcaattctcttgtaggcctgataagcgtagcgcatcaggctgatttggcgtttatcatcagtgattaacgcttgtaaatgaactcaacgccttcttcgtcgtcttcgtcccagtcgtcatcccagtcttcatcatcctcttcagcaatctcttcaagctgctggcgatgataatcatcccacatgaattcgactttctctggctgtttcgcttcttcagcctgcacgaccgggttttcaatgataaaggtcatcacatcccagcagagatctttcacgcccagtccactcgccgcagagatcagataatatttatcttcccagcccagcgcctcagcgatcgctttcgctttctcttcggcttctaccttatccagcagatcgatcttgttgaacactaaccaacgcggtttcgtcgccagatcctggctgtatttttccagctcgctgataataatacgcgcgttttcaaccggatcggtgccgtcaatcggatcgatatcgatgaggtgcaacaggacgcggcaacgttccaggtgcttcaggaagcgaatgcccagacctgcgccttccgcagcgccttcaatcagtcctggaatatcggcaacaacgaagctcttttcgttgtccattcgtaccacacccagacttggcaccagagtggtaaacggataatccgccactttcggtttagccgccgataccgcacgaataaaggtcgatttacccgcgtttggcatccccaacataccgacgtcagccagcagcatcagctccagcagcagctcgcgcttatcgcccggcgtgccgttggttttctgccgcggtgtacggttaacggacgatttgaaacgggtattgcccagaccgtgccagccgcccttagcaaccagcagacgctgaccgtgtttggtcatatcgcccatggtttcaccagtaccctggtcgattacacgcgtacctaccggcactttaatcgtcacgtctttaccgcgcttaccggtacagtcgcggcttgcgccattctgaccgcgctctgcacggaaagatttttcaaaacgataatcgataagcgtgttcaggttctcgtcggcttccatccatacgtcaccaccatcaccgccgtcgccgccatccgggccgcctttcggaatatacttttcgcggcggaagctcacgcaaccattaccgccatcacctgcaacgaccagaatcgatgcttcatcaacaaacttcattttattctccgtaaatcattcgcctgcgcggggttgcgataccaccgttgtatgcttacgtaatccgccccaaatacgatgaccaatggcggaatacatcgcgcccgcaaccacgacaaacgcaccgagataacctaaaaggtttaacatcggtctggcgaagaaatcgggccaggccagtgataaaagatctgaaaaaaacagcgtaaacagtggggtgagcgtgatgatcgcgctcacctgcgctgcctgccagcgagccatcgcttccgccagggcgccatatcctaccaaggtattcagtccgcaaaaaattaaacatgcgagctgccagtggctaagctgcgctatcactccaggctttgccagagggaagagcgcaattgtacataaagtgtacagtaaaaacaggatctgcggtgaggccagccgacgcaataaaaccttttgcgccacgccataactcacccaaaccgtcgccgcaccgaccccaaagataactccccaggtgtaatcggtgagctttgtaaatatctcgaccagactggtgttaaaaaacatcaccaggccgctcaggagcatcaatgcccctacaacctgagtgctgcgcattttctctttgaggataaatacgctggcaaccatcatgccaactggcgagagttgcccaatcacctgcgaagcggtcggactcaggtattgcaaggatgagctgaacaggatgaagttcccaaacagcccggcggtcgccactgccaacaaaatcaaccagcgtggcttacgaaacacgcgtaatggcggcaacctcttcttcaccgcaagaatggcacccaggccaatactcgccatcaagaaacggtaaaacacgattgtcggaggttccatcacctccagcacctgcttcattgcgattggcaacgccccccagcaaattgctgtggtgagcgccaaaagaatgccaatgcctgcctgctgcttcataccgtattccctgcaaagcgcatttgcggattaacgtcgcaccatgcgcatttttaccggttatcgaatgtaaaaagccccgcaacgtgttgcggggctttcatccgttaccgggacgcgaaaaacttattcagcttcgatgctgataaatttacggtttttcgggcctttaacttcgaatttcactttaccgtctgctttagcaaacagagtgtggtcacgaccgcaacctacgttagcgccagcgtggaatttggtaccacgttgacgaacgatgatgctacccgccagaacggattcgccaccgaaacgcttaacgcccaggcgtttagcttctgaatcgcgaccgttacgtgtggagccgccagcctttttatgtgccatttgaaatctctcctcaggtcttaggcgctgatgccagtaattttcacatcagtgaaccactgacgatggccctgctgcttacgatagtgtttacgacgacgaaacttaacgattttaactttctcgccacgaccgtgagcaacaacttcagctttgattacgccgccatcaacgaaaggaacgccgattttgacttcttcaccgtttgcgatcatcagcacttcagcgaactcaacagtttcgccagttgcgatgtccagcttttccaggcgaacggtctgaccttcgcttactcggtgttgtttaccaccactttggaaaaccgcgtacatataaaactccgcttccgcgcacaccttttcaatgattcagagtgcgctataaatattcacaatagggcgcgaatattacgcaaaacgcacgcctttgacaagtgctacagtcaatacacgaagaaaaaaaacacaacttgtacggtaacgtttatctgtgccattttttcagtacaatcaccctatattcctaaccataaaccctaagttgcctttgttcacagtaaggtaatcggggcgaaaagcccggcttttgcgatgaatttagaaaaaatcaatgagttaaccgcgcaagatatggcgggtgttaatgcggcaatccttgagcagcttaattccgacgtccaactgatcaatcagttaggctattacatcgtcagcggcggcggtaaacgtattcgtccgatgattgctgtactggctgcacgagctgttggctatgagggaaatgcgcatgtcaccattgctgccctgatcgagtttatccacacggcgactctgctacacgacgacgttgtggatgaatcagatatgcgcaggggtaaagctaccgccaacgccgcatttggcaatgccgccagcgtgctggtaggcgattttatttatacccgcgctttccagatgatgaccagcctcggttcgctcaaagtgctggaagtcatgtcagaagccgtaaacgtcatcgcagaaggtgaagttctgcaactgatgaacgttaacgatccggacatcactgaagaaaactacatgcgcgttatctatagcaaaaccgcgcgtctgtttgaggctgccgcgcagtgttccgggattctggctggctgtacgccggaggaggagaaaggcctgcaggattatgggcgctatctcggcactgctttccagttgatcgacgatttactcgattacaatgccgatggcgaacagttaggtaaaaatgtcggcgacgatctgaacgaaggtaaaccgacgctgccgctgctgcatgcgatgcatcatggcacaccagaacaggcacagatgatccgtaccgccatcgaacagggtaacggtcgccatcttctggaaccggttctggaagcaatgaacgcttgtggatctcttgaatggacgcgtcagcgtgccgaggaagaagcagacaaagccatcgcagcgttacaggtgctcccggacaccccttggcgagaagcactcatcggcctcgcgcacatcgctgttcaacgcgatcgttaatcccctcccctcatcccgcgcagcgcgcgggatggttccagtaagttccataaaaacacttattcagctctataacacctgaaaaatagggatgtgcatctttatatattctgaatattcacactctttacaggaactttttagagcaataggccatcaggagtatagtgatgctcgacagaagaagtgttctgaatgaaagcgactaacttaaggagtgaggaaaaatggaaagtaatttcattgactggcatcccgctgacatcattgcgggtttgcgcaagaagggaacgtcaatggcggcggaatctcgcagaaatggtttgagttcctcaacgctggcgaatgcattatcgcgcccatggccgaaaggagagatgattattgcgaaagccctgggaactgacccctgggttatctggccatcacgctaccatgatccgcagacccatgagtttatcgacagaacgcagttgatgcgtagctacactaaaccgaaaaaatgagtggtctggcggtagccccgcgaacggggctgccagctctcagacgattattcgcctttcacacgctcaatatttgcacctaaagcgcgcagtttgtcttcaatgcgttcgtagccacgatcgatgtgataaatacgatcaaccaccgtcgtcccttccgcaatacagccagccagcaccaggcttgctgatgcacgcagatcggttgccataacctgtgcgccagaaagtttttcaacaccgtgacaaataacggtattgctttcgatttcggcgtgcgcgcccatacggctcagctctggcacatgcataaagcggttttcaaagaccgtttcggtgataaacccggtcccttctgccaccaggttcaacagcgtgaactgggcctgcatatcggtcgggaatgccggatgcggcgcggtacgtacgttaacagccttcggacgtttgccatgcatatccaggctaatccagtcttcgccgacttcgatgtccgctccagcgtcacgcagtttcgccagcacggcgtcgagagtatctggctgcgcgttacggcagataattttgccgcgagaaatcgccgccgccaccaggaaagtaccggtttcgatacgatccggcagaacgcgatagacaccgccgcctaaacgttccacaccttcgatgacgatacgatcggtgccctgaccgctaattttcgcacccagcgtaatcaggaagttcgcggtatcgacgatttccggttcacgcgctgcgttttcaataatcgtggtgccttccgccagggttgcagcacacatgatggtcaccgttgcgccaacgctgactttatccatcacgatatgtgcacctttcaaacgaccatcgacggaagctttaacgtaaccttcttccagtttgatggtcgcgcctaattgttcgaggccagaaatgtgtagatcaaccggacgcgcaccgatcgtacaaccgccaggtagtgaaacttgcccctgaccaaagcgcgctaccagcggccccagcgcccagatagaagcacgcatggttttaaccagatcgtaaggtgcgcagaatacattaacgtcgcgggcatcaatatgcacagaaccattacgttctactttcgcacccagctggcttagcagcttcattgatgtatcgacgtctttcagtttcgggacgttctggatctctaccggttcttccgccagtagtgcggcaaaaaggataggcagagcagcatttttagcgccggaaattgtgacttcgccctggagcttcgttggcccctgaacacgaaatttatccatttagtttgttctcagttaacaattcatatccgctaccggcgaatcgcccatagctcaaaagccgttcagtttgcgatcgcgcgcccactccgcaggggtatacgctttgatcgacacagcatgaatgcggttatccgcaatatattccatcagcggaccatagaccgtctgctgttttttaacccgactcatgccgtcaaacaactcacccacggcaataacctgaaagtggctgccatcgccggaaacgtggacttcctggagggagagagcgttcatcaacacgctctgaatttcattattttccatgggatcttcaatcatcagttaataaaccagcgaaacatcttagagcaaagttgcgctggcataaataagcaaaaagcctcgctgataaatcagacaaggctcgacttgcaggcaggtttgccggacaggcggttaacgccatatccggcctgaaaaaatttaacgaggcagaacatcagcaggcaaattatacaatttcgccagggtatacactttgtcgtttaccccctgaagcgtcacattgttgccctgctttttcgccagatcgataagatggagcagcagtgccagtccccccgtatccacgcgggagacacggctaagatcgatgcaggtaatccccttcaccgcttcctcacgcatttcccaaagcggtagcaaaacgtcctgatccagctctccggataacgccagcgtgtcacccgtctgcatccagctcagtgactcgctcattattttttctcttccagagtgattttctgttgagaaatcgatttcagttgcgcagtcaggccgtcgatacctttggtacgcagcagcgttccccactcgttttgtttggtggtgatcatactgacgccttcagcaatcatgtcgtaagcctgccaattgcccgtctgggagtttttacgccactggaagtccagacgcaccggcggacggccattcgggtcaataatggtaacgcgaataggcacaatggttttatcgcccagcggctgttctggcgcaatctgataggtttgaccgtgatacatcgccagcgcctgaccgtaagcctgcttcaggtactcacggaaagcggcaaagtaggcttcacgttgagcaggggtcgcactcttgtaatactggcccagcaccagcgcaccggcgtatttcacctgtacgtatggcagcagttcctgatcaacaatggtacgcagataatccgggttggcccgaatttgcggttgctcattcttcaggcgatcgaacgttttctgcgccgcctcgtccatcagcttatacggattggtctggtctgccgcggttgccgcactcagaggtgcaatcaccagcaaagcgaccatcattaaacgtttaaacatgcgtcggttctcctgaaattatttcgttgtacccacaggttcagtggtttcattattacctggcgcagcagctggcgcatcgccactattcttattgtcatcgcctttactaccgtaaaggaactgaccaatgagatcttccagcaccatcgcagacttagtgtcctgaattgtatcgccatccttcaggatagcagtccccagttccgggtcttcaaaaccgacgtttaatgccagatattgttcccccagcaggccggaagtacgaatgctcagcgaactggtatctggaatgtggttataacgttgttcaatttccagcgttacgcgcggcagataggttttcgggtccagcgtaatatccgccacccgacccacaacaacgccaccaatactgaccggagagcgcgctttcaggccgccaatgttatcgaacgtcgcataaagcgtgtaggtcggttcagtacgtatggacgtcacgttcgccgccttcaggcaaacaaacagcgccgccagcagtgctgctaataaaaagatacccacccaaatttcattttttttcgtttgcatgaactcaattcccaaacatcaatgcggtcagcacaaaatccagccccagaacagccagagacgagtggacaacggtgcgagtggttgcccggctaatcccggcagacgtcgggatggcgtcgtagccgttaaacaacgaaatccacgtcaccgtgatggcgaacaccacgctcttaatcagacagttgaccagatccatacgccagtcgacggcattttgcattgccgaccagaagaacccgctatcaatgcctttccaactgacgccgaccagagatccgccccagatccccacggcgacgaaaataaccgtcaacagtggtaatgaaataaccccagcccagaaacggggagaaataacccgacgcagcggatccaccgccatcatctccatactggagagttgctctgtagcgcgcatcaggccgatttctgcggttagcgccgaaccagcacgcccggcaaacaacaacgcggcaaccaccggccccagttcacgcagtagcgataacgccaccagcatacccagactggtttccgcactataagtggtcagaaccagataaccttgcagccccaacaccattccgatgaacacgccagaaaccacaataatcagcatcgacaggacgccgacattatagagctggcgcaccagcagcggcgcatgtttgcgaaattccggtttgccgaccagcgcattgaataacattaacccggcccgcccgaacgttctcagggttttaatccctttatgtccgagcgacgccagcgcatttaacagcatgagtggcttaactccctggtaaaagatcagcgtgataatcgccggcaggatagcggaacggaacaggcccgtcagctatcccgtccagaaactgacgtacgcgcggatcaggattcgcctgcaacgcctgggcactgccatgagcgacaatttttttgtccgccaggatccaggcgtgatccgcaatacttaacacttccggcacatcgtgagaaaccaccacacaagtcacgcccagcgcgctgttcagctcagaaatcagcttcaccagtacgcccatggtgatgggatcttgcccaacaaaaggttcatcaaacatgatgagatccggctccagcgcaatcgcacgcgccagcgctgcacgccgcgccatcccaccggaaagttcagaaggcattagtttagccgctccacgcagccccacggcctccagcttcatcatcaccgtactatgcaacaatggcgcgggaagttgggtatgttcgcgcagtggataggcgacgttgtcaaatacgttcatatcagtgaacaacgccccggactgaaataacatgctcatccgtttgcgcactgtatacaggcgcgaacgagacatcgccggaatattctcaccatcgaaaaggatctcaccatgatctggtgcgatttgcccgccaatcagacggagtagcgtcgttttaccgatgcccgatggccccatgatcgccgtgatcttccctcgcggcacggtcagggaaatattatcgaagatgcagcgattgccacgcgtaaaactgacatcgcgcatatcgactaaattcgccacagactgctccataattcacccttcgtcttgcgttgattttctaagcatggcgctcaatttaaccttgaacccaacatatttacagaatattacccgccgtggttagcgaaagctggcatttgttttactttttagccgcataaagtcaaaattaagcatccgttacggctttctgaaaatcttcagcggaccggcgagtatacctgaagaaaggacgttagatgcttttagctacggcactgttaattgttggtttacttttggtcgtttacagtgccgaccgcctggtttttgccgcgtctattctttgccgaacctttggcatcccgccgctgatcatcggcatgacggtggtcagtattggtacatcgttaccagaagtcatcgtctcgcttgccgcgtctctgcacgaacaacgcgatttagccgttggtacagccctcggctcaaacattatcaatatattgctgatcctcggtctggctgcgctggttcgtccttttaccgtccattctgatgttctacgccgtgaattacccttaatgttgttggtcagcgtggtggccggttccgtactctatgacggacaacttagtcgcagcgatggtatctttctcctctttctggctgtgctatggctgctgttcattgttaaacttgcacgtcaggctgaacgtcaggggactgacagcctgaccagagagcagcttgcagagctgccgcgtgacggcggattgcccgtcgcgtttttatggctcggcattgcgcttatcatcatgccagtggccacgcggatggtggttgataacgccacggtgctggcgaattactttgccatcagcgagttgacgatgggtctgacggcaattgctatcggaaccagcctgccggaactggcaaccgcaatagcgggggttcgcaaaggtgaaaacgacattgctgtcggaaatatcattggcgcaaacatttttaatattgtcatcgtgttgggtttacccgcgctgataacgccaggagagattgatccactggcgtacagtcgtgactacagcgtgatgttgctggtgagcattatttttgcgttgctgtgctggcggcgctccccgcaaccgggccgtggtgtaggggtattattaactggcggatttatcgtatggctggcgatgttgtactggttatcgccaatactcgttgaataactggaaacgcattatgtcgcacgtagagttacaaccgggttttgactttcagcaagcaggtaaagaagtcctggcgattgaacgtgaatgcctggcggagcttgatcaatacatcaatcagaatttcacgcttgcctgtgaaaagatgttctggtgtaaagggaaagttgtcgtcatggggatgggaaaatcggggcatattgggcgaaaaatggcggcaacgtttgccagcaccggtacaccttcatttttcgtccatcctggtgaagccgcgcatggtgatttaggcatggttaccccacaggatgtggtgattgctatctctaactctggtgaatccagcgaaatcacggccttaattccagtgcttaagcgtcttcacgtaccgttaatctgcatcaccggtcgcccggagagcagcatggcgcgcgccgcagatgtgcatctgtgtgttaaagtagcgaaagaagcctgtccgttagggctggcaccgaccagcagcaccaccgccacgctggttatgggcgatgccctcgctgtcgcgctgttaaaagcacgcggctttactgctgaagattttgcgctctcacacccaggcggcgcactgggtcgtaaacttctgctgcgcgtaaacgatattatgcatacgggcgatgagatcccgcatgttaagaaaacggccagtctgcgtgacgcgttgctggaagttacccgcaaaaatcttggtatgactgtcatttgcgatgacaatatgatgattgaaggcatctttaccgacggtgatttacgccgtgtcttcgatatgggcgtggatgttcgtcagttaagtattgccgatgtgatgacgccggggggaatacgtgtgcgccctggcattctggccgttgaggcactgaacttaatgcagtcccgccatatcacctccgtgatggttgccgatggcgaccatttactcggtgtgttacatatgcatgatttactgcgtgcaggcgtagtgtaaagattcaaggataaacaacaatgagcaaagcaggtgcgtcgcttgcgacctgttacggccctgtcagcgccgacgttatagcaaaagcagagaacattcgtctgctgatcctcgatgtcgatggcgtactgtcagatggcctgatttatatgggcaataatggcgaagagctgaaagcgttcaatgttcgtgacggttatggcattcgttgtgcgctcacctctgatattgaagtcgctatcattaccgggcgaaaggctaaactggtagaagatcgttgtgccacattggggatcactcacttgtatcaggggcagtcaaacaaactgatcgcctttagcgatctgctggaaaaactggcgattgccccggaaaatgtggcttatgtcggcgatgatctcatcgactggccggtaatggaaaaagtgggtttaagcgtcgccgtggccgatgcgcatccactgttgatcccgcgcgccgattacgtgacgcgcattgctggcggtcgtggcgcagtgcgcgaagtttgcgacttattactcctggcgcagggcaaactggatgaagccaaagggcaatcgatatgagtaaagccagacgttgggttatcattgtgctatcactggcggttctggtgatgatcggcattaatatggccgaaaaagacgataccgcccaggtggtcgtcaacaacaatgatcccacctataaaagcgagcatacggacacgctcgtctataacccagaaggggcactaagctatcgattgattgctcaacacgttgaatattattccgatcaggccgtttcgtggtttacgcagccggtacttaccacgtttgataaggataaaatcccgacatggtccgtaaaagcagataaagccaagctgaccaatgaccggatgctctatttatatggacacgttgaagtcaacgcacttgtgccagactctcaacttcgcagaatcacgacggataacgcgcagatcaatctggtgacgcaggatgttacctctgaagacctcgtcacgttatacggaacaacatttaactccagcggtctgaaaatgcgcggcaacttacgcagcaagaacgccgagctgattgaaaaggttagaacatcctatgaaattcaaaacaaacaaactcagccttaatcttgtgcttgccagctcacttctggccgccagcattccggcatttgccgtaaccggagacactgatcagccgatccacattgaatcggaccagcaatctcttgatatgcaaggcaacgtggttacctttaccggtaatgtcatcgtcacccagggcaccatcaaaattaatgccgacaaagtggtcgttacccgtccgggcggcgaacaaggtaaagaagtgattgacggctacggtaaaccggcaacgttctaccagatgcaggacaacggtaaacccgttgaaggtcacgcttcccagatgcactacgaactggcaaaagattttgtcgttctgacgggtaatgcttatctgcagcaggtcgatagcaacattaagggcgataagatcacttacctggtgaaagagcagaaaatgcaggctttcagcgacaaaggcaagcgcgtaacaaccgttctggtgccgtcgcagctgcaggacaaaaacaacaaaggccagaccccggcacagaagaagggtaattaattcgttatggcaacattaactgcaaagaaccttgcaaaagcctataaaggccgtcgcgtggtagaagacgtcagcctgaccgtcaactccggggaaattgtcggtctgctggggccaaacggtgccggtaagaccaccactttctacatggttgtaggcattgtgccgcgcgatgcgggcaacatcattattgatgatgacgatatcagtctgctgcctctgcatgcacgcgcgcgccgcggtatcggctatctgccacaggaagcctccattttccgtcgcctcagcgtttacgataacctgatggcggtactgcaaattcgtgacgacttgtctgctgaacaacgtgaagaccgcgcgaacgagctgatggaagagtttcacattgagcacctgcgtgacagcatggggcagtcactctccgggggtgaacgtcgccgtgtagaaattgcccgcgcactggctgcgaatccgaaatttattctgctcgacgaaccgtttgccggggttgacccgatctcggttatcgacattaaacgcatcattgagcacctgcgcgacagcggcctgggcgtgctgatcactgaccacaacgtgcgtgaaacactggcggtttgtgaacgcgcttatatcgtcagtcaggggcatttgatcgcccacggcacgcctacagaaatcttacaagacgaacacgttaagcgtgtataccttggggaagacttcagactctgatagggtagaagtttgcgacgttttagcaggagagtacgattctgaacatgaagcaaggtttgcaactcaggcttagccaacaactggcgatgacgccacagctccaacaggcaattcgtctgttgcagttgtcgacgctggaacttcagcaggagctacagcaggcgctggagagtaatccgctgcttgagcaaatcgacactcatgaagaaatcgacacccgcgaaacgcaagacagtgaaacgctggacaccgccgacgcgctcgaacaaaaagagatgccggaagagctgccgctcgatgccagttgggacaccatttacaccgctggtacaccatccggcaccagcggtgactacattgacgacgagctgccggtctaccagggcgaaacgacgcagaccttgcaggattacctgatgtggcaggttgagctgacaccgttttccgacactgaccgcgctattgctacctctatcgtcgatgccgttgatgaaaccggttatctgactgtcccgctggaagatattctcgaaagtataggcgatgaagagatcgacatcgacgaagttgaagccgtccttaagcggatccaacggtttgatccggtcggtgtggcggcaaaagatctgcgtgactgtctgctgatccaactctcccaattcgataagaccacgccgtggctggaagaggccagactgatcattagcgatcatctcgatctgttagccaatcacgacttccgcactttaatgcgcgtcacgcgtctgaaagaagatgtgctgaaagaagccgtcaatctgatccagtcgctcgatccgcgccccgggcagtcgatccagactggcgaacctgagtatgtcattccagatgtgctggtgcgtaagcataacggtcactggacggtagaactcaacagtgacagcattccgcgtctgcaaatcaaccagcactacgcctcgatgtgcaataacgcgcgcaacgatggtgacagccagtttatccgcagcaatctgcaggatgccaaatggttgatcaagagtctggaaagccgtaacgatacgctactgcgcgtgagtcgctgtatcgttgaacagcagcaagccttctttgagcaaggtgaagaatatatgaaaccgatggtactggccgatatcgcccaggctgtcgaaatgcatgaatcgacgatatctcgcgtgaccacgcaaaaatacctgcatagtccacgaggcatttttgaactgaagtatttcttttccagtcacgtcaataccgagggcggcggcgaagcttcctccacggcgattcgtgcgctggtgaagaaattaatcgcggcggaaaacccagcgaaaccgttgagcgacagcaagttaacctctttgctgtcggaacaaggtatcatggtggcacgccgcactgttgcgaagtaccgagagtctttatccattccgccgtcaaaccagcgtaaacaactcgtttgacccaaccgataaggaagacactatgcagctcaacattaccggaaataacgtcgagatcaccgaggcactgcgcgaatttgttacagccaaatttgccaaacttgagcaatattttgaccgaatcaaccaggtctatgttgttctgaaagtggagaaagtcacccacacctcagatgcaacactgcatgtaaacggtggtgaaattcatgccagcgcggaaggtcaggacatgtacgctgccattgatggcttaattgataagctggcacgccagttgaccaaacataaagataaactgaaacaacactaattgtccgggcaattagcatgtgcatggcggtctgttgtgcggcacaacgggccatttgtacggttaatgctccgagcctgttccactgtttgagtgggcaggttcttaggtgaaattatgacaaataatgatacaactctacagcttagcagtgttcttaacagggaatgtacgcgaagccgcgtccactgtcagagcaaaaaacgcgccctggaaatcatcagcgagctggcggcgaaacaacttagcctgccgcctcaggtggtttttgaagctatcctgacgcgggaaaaaatgggcagtaccggtatcggcaatggtattgccattccgcatggcaaactggaagaagatactctgcgcgccgttggcgttttcgttcagctcgaaacgcctatagctttcgatgccatcgacaaccaaccggtggacttactttttgccctgctggtgccggcagaccaaactaaaacgcacctgcatactctgtcgctggtggcgaaacgtctggcggacaaaaccatctgccgccgtttacgcgcagcccagagcgatgaagagctgtatcaaatcattacggataccgaaggtactccggatgaagcgtagttattcggtaatgtctcttttagacgttgtgaggagaaacagtacatggtactgatgatcgtcagcggacgttcaggttcaggtaaatctgtcgccctgcgtgcgctggaagatatgggtttttactgcgtggataaccttcccgtagtgttgttacccgatctggctcgaaccctggccgatcgcgagatttctgccgccgtcagcattgatgttcgtaatatgccggagtcaccagaaatattcgaacaggcgatgagtaacctgcctgacgctttctcaccgcaactcctgttcctggatgccgaccgtaataccttaattcgtcgttacagtgacacgcgccgactgcatccgctttccagcaaaaacctgtcgctggaaagtgctatcgacaaagaaagcgatttgctggagcctctgcgttcgcgagcggatctgattgtcgatacctcagaaatgtccgttcacgagctggctgaaatgctgcgtacccgtctgctgggtaaacgtgaacgcgaactgaccatggtctttgagtctttcggcttcaaacacggtatccctatcgatgcagattacgtctttgacgtgcgcttcttgccgaacccgcactgggatccgaaactgcgtccaatgacaggtcttgataaacctgtcgccgcgttcctcgaccgccacacagaagtacacaattttatctaccagacgcgaagctatcttgagctatggttacctatgctggaaaccaacaaccgtagctacttgacggtcgccattggttgtaccggcgggaagcaccgttcggtgtatattgcagagcaactggcagactacttccgctcgcgcggtaaaaacgtccagtcacgccatcgtacgctggaaaaacgtaaaccatgaccgtcaagcaaactgttgaaatcacaaacaagctgggcatgcatgcccggcctgcaatgaagctgtttgaattaatgcagggttttgacgctgaagtgctcttacgtaatgacgaaggcaccgaggctgaagccaacagcgttattgcgctgctgatgttggattctgccaaaggacggcagattgaagttgaagcgaccggtccacaggaagaggaagcactggccgccgttatcgccctctttaattctggttttgatgaagattaatcttcatcactttgacatacaactcccttcaaactccccccgacaataagaaaatcacgtactgaaatcgttctcaatcaacgtcatttgtacattttgtgcgcttttcactttcagaagaaccttaagaaaaccttaagaggcattgtttaggttttgtttaagttaatcgaccatactggagatcgtcagaaaatatttccaggagatggcatgattcgcttatctgaacaaagtcccctgggcaccggaagacatcggaaatgttatgcgcatccggaagatgcccaacgctgtatcaagattgtctaccatcgtggcgatggtggcgataaagagatccgccgtgagttaaagtactacgcgcatcttggtcgccggttaaaagactggagtggaataccgcgctatcacggtaccgttgagacggattgcggaaccggttatgtctacgatgtgattgcagattttgacggcaagccttccattacgctgaccgaatttgctgaacaatgccgttacgaagaagacattgcacaactgcgccagctactgaaacagctgaagcgttatttgcaggataaccgtatcgtgacgatgtcgctgaagccgcagaatatcctctgtcaccgcatcagtgagtcagaggttatcccggtcgtctgcgacaacattggtgaaagcacattgattccactggcgacctggtcgaagtggtgttgtctgcgtaagcaagagcggttatggaaacgatttatcgcccaaccggcgctggctattgccctgcagaaagatctgcaacctcgtgagagcaaaacgctggccctcacttcgcgcgaagcttaatccagctggtgttgttgcataaacggctcaccgcctaactgatacatctgccgtaaaatccacgcctgacggctacgcacgtagcccgatggcgaggagactttgaaacgaagtggattaggtaatacagctgccagtaatgcagcttccgaccgggtaagtttgctcgcgggtttgtggaaataacgttgtgccgcagcttcgacgccaaacacaccgtcgccaaattcggcgatattcaggtaaaccgtcaggatacgctttttgctccagaccgtttctatccccagcgttaatccggcttccagcccttttcgaacccagctacgcccatcccataaaaagagatttttggctgtctgttgagaaatcgttgaagcaccgcgaatacggttttcattgcgctcgttgtgcgccagggctttctcaatggaagcgacatcaaagccccagtgctcaggaaatttctgatcttctgcggcaatcaccgccagtcccatccacggcgagatttgatccatactgacccagtcagaatgtgccacgtaacgaaaattgccatgcagccaggcgctgacctgtcgctcgaccattaccgctgagaagggaacaggcgcaacgctaaacaacgcgatgcccccgccccagaaaacggcgaggacaaccattaaccgcaaaagaaaacggcgaacgaaactaaacaccgttaagcggcttttactcattcagccagaaccagcacgcgggaaaccagcttatcaatgccgctcgccgcttctgcaatgttctgcgccagcatatatgctggggtggtgacaatcttattgtcttcatcaaccacgatatcatcgacaggacacggcacatgctccgcgcccatctcttccagcacttctgcggtatcgatatcagtaccgatggtcaaacgcagcgggaaatcgaaaattttcggcagcatcgccggggcaatacacataaaaccaagcggttttccggcctgatgcatcgcttgtgccagcgcctttaattcacggtcaacggtgcattcgctaccaagactggcaaaattgcttaaattcttcgccgcgccaaacccccccggcacaatcaacgcatccagttcagcggcatcggcctgggccagaggacggatttcaccgcgcgttattcgtgccgcttcaatcagcacattgcgcgtttccgtcatcgcttcgccagttaaatggttgataacatcaacctgctgcttatccggtgcaaagcagaccgcctgcgcaccgctgcgtgaaatagctaacaacgtcaacaccgcttcatgaatttcagaaccgtcatagacgccgcatccgctcagaattacgccaattttcttcattgtgatcatcctttcgcaattgactgaaacacattaatttttttaataaaaatggtacgcatcacacatttaactgattcatgtaacaaatcatttaagttttgctatcttaactgcgtgcggcctgaaaaacagtgctgtgcccttgtaactcatcataataatttacggcgcagccaagatttccctggtgttggcgcagtattcgcgcaccccggtctagccggggtcattttttagtggcttttgccacccacgctttcagcacttctacgtcgtgacgccactcttctttcatctcttcaatccattcaccgacgttatcttcccaggccggaaggtcaggagactgaatttgctgacccagctgttgcagatggcgtaaccccactgaccccgccgcacctttaattttatgtccttcctcaacaatgccttttttatcctgcgccgtcagattcgactccagcacgctgacatagcccggcatcatcttctcaaacaccgctaacccgtcggtgatcagcttcggtcctacaagttcgagatactgttccagcatgggaatatcgagcaatgcttctgatttactgttctcttctgtcgtcaccgtactctcctcatcatcctgggtatcccagaatttcttgatcatcgcggttagcgccggaacagaaagcggcttactcagcacatcatccattccagcattgaggtactcttgtttgtctttcagcacgttagcggttaaggccaccagcggcggtaaatcctcgcgcggataacgtttcgtcagttcacgagagatatccagcccggtcatatctggcaactgaatatccagcaacaccaggtcgtattcgcccggtttaaacatctccagcgccgccttgccggtcatggcgacatcaacgctgttacctaatttttccagcacagaacgcgcaacaatcacgttcagttcaatgtcttccaccagcagcacattcagcgccggtaaaggcatatcgtcttcatcaaacgcatcatcgacctcttctgctaccgacggtgcgtggatcgtcaacgtaaaggttgaacctttgccctgttcgctggtaaccgtaatatcgccgcccatatttttcgccagacgacgagaaacggccagaccaataccggtggcaggtttaccgccatgactgtctttcacctggtaatacatggcgaaaattttatccagctcatcctgcggaatgccgataccagagtcttccacttcaaaatgcagcatatcgccttcatcgtagcgcacgcgcacggtaacctggccttgctgggtgaatttgacggcgttactgatgaggttccacaggatctgccgtaaacgcgtcccgtcggtaatgacctgatgcggtaatggcagcgtcggctccaggttaaagcgcaatcctttttgttgcgcctgcaatgcggagagattttccagatcggcaaggaagctggtgaaatcaaccggttgattatcaagctggaccttgcgccgttccatcttatccatgtcgataatatcgttaaagatattccccagcgtgacggccgaaacatggatggtcttgagatatttttcctgctcggcggtgagttcggtatccagcagaatgcggctcagaccgacgataccgttcagcggtgtacgcaattcgtgactgatggtggagataaacgtcgttttgtcgcggctggcccgttcaagcgcatcctgataccgcttacgctcggtaatgtcgcgaccaaagcccatcaaaccgtgacgtttacccacgcggtcgtagtacggcactttacggatttcaaagcaggctttgcgcccgtccgggtaatccagccactgttcataggtcagtgacacattatgacggaacactttttcatcggtttcaatgacttttgcggcggcttccggtgagtaaacatcagcaggtttcaggtgaaccagttgtttttcgctttttccggtcagcagctccatcgcgcggttacagccggaaaactctttatcttcgttacgataaaaaaccaggtcgggtgaagcatcaaggaaggaacgtaagaatgaggattgctgctcgagctgaatttgtgtctcttcgcgctctttgatttcaattttcagttggccgaaggtttcctgcagttctgcttccgctttttcacgaacggcaatttcctgatttagctgggcaatattatcttttaactgaacgttgaggctcaaatcgcgctcgcgcatctcctccagtttttgcaccagccgtgacagacgttgtcgtgactcctccagttgctcgacgaccaccgatagaaagtagaccgcccacggcgtaatcagcaaaccaaagaagatagaacgaataacatcaatgctttcgacctgaccatgcagcaccatggttaccgccatttgtaccacaatggcaagaacgacgagggccagcgccagcaacattgagaagcgcaccagacctaacttcatcatcaggtcaacataatactgcgccagcagacgaatttgcttcattagggaattccttcacgacaacctgccccaataatacccaattctgacagttacgttataaattgtgtgagaaatgcggaattcccctcaacgacctactccgttggaggtagccacggacgtcccagcgccgatccctgtacgccatgttcattcagatagcgatccagctcgaccattcccgtccatcgattttcgcaccacagcggagcaagcagcgtcgggcgacgggcgctggcggaaatgcggtggtagatcacttccggtggcgtatggcgaatcatttctccggcagtgagcgtgtaatcctccagttcaataccgttcaaacgccccgcttcccaggctttcgccataatgctgcctttcacaatatgcagcggatgcagctttatgccgtccacgccggtttcaaccactcgctccagcgtttgcaaacattcagcctgcccttcgccaggcaggccgacaattaagtgggaacacaccttcagcccgcgctgacgtgccagctgggttgtacgctgataacaggcaaaatcatggccgcggttgatgcgatgcagtgttttgtcgtgggcggtttgtagccccagctccagccacacttcgtaaccctggtccttatattcgcaaagcagatccagcaccgcatccggcacgcagtccgggcgggtacccacacacaaaccgacaatattggcctggctcaccgcctgctgatacatagaacgcagcacctgaacttccgcaaaggtgctggtatacgcctgaaagtaggccagatagcgtttagcgcggttaactaaattcgcctggtgcgccagttgctcggcaatggaacgatgctgctgcgcttcatcggcaaacgaggcaacattacagaatgtgcagccaccacgcccgatggtaccgtcacggttagggcagctaaaaccgccgtgcagcgtcagcttatgcaccttttgcccataacgacgggtgagatcaccaccaaacatattgactaatttctgtaactgcataatctgatagaccgcgccttgaaaagaggccaaagcctgccatttttagctcaattcggcgatgacctggatcaatcgtcccggcctgcttttatcaactgcataatcaatcaaaattaccgaaatttcatgcataatcacataaatcacttttgcttatcttgtgtcagatttttttatctcctgatggattttaggcaaaaacagtagcatgaaacgtcattaccaattaaggcagtataaaatgctggttttgtcgtcagttcaaggcaggataagggttaacacacctttatgacagtcaggaattgactgtttctctaacgacttcccttttagccttaaagataaaatccattttaatttcagtcatttaataaagaattttgcgctaaagcacatttctgtaccaataagcttgccatttgacctgtatcagctttcccgataagttggaaatccgctggaagctttctggatgagcagcctgctcatcatatttatgcagtaattgagatcccctcttcaccgtattaaccgatgcgaaaaggacaacaagggggcgaatcggaggcgcgcgtatgacacgcaaaccccgtcgccacgctctttctgtgcccgtgcgcagcggttcggaagtggggttcccgcagagcctgggggaggttcacgatatgttgtacgataaatcccttgagagggataactgtggtttcggcctgatcgcccacatagaaggcgaacctagccacaaggtagtgcgtactgcaatacacgcactggcccgcatgcagcaccgtggcgcgattctcgccgatggtaaaaccggcgacggttgcggcttgctgttacaaaaaccggatcgcttttttcgcatcgttgcgcaggagcgcggctggcgtttagcaaaaaactacgctgtcgggatgctcttcctgaataaagatcctgaactcgccgctgccgcacgccgcatcgttgaagaagaactgcaacgcgaaaccttgtcgattgtgggctggcgtgatgtccccactaacgaaggcgtgctgggtgaaatcgccctctcctctctgccacgcattgagcaaatttttgtgaacgccccggcaggctggcgtccacgcgatatggagcgccgtctgtttatcgcccgccgccgcattgaaaagcgtctcgaagccgacaaagacttctacgtctgtagcctgtcgaatctggtgaacatctataaaggtctgtgtatgccgacggatctgccgcgcttttatctggatcttgcggacctgcgtctggaatcggccatttgcctgttccaccagcgcttctccactaacaccgtaccgcgctggccgctggcgcaaccgttccgctatctggcgcataacggtgaaatcaacaccatcaccggtaaccgccaatgggcgcgtgcgcgtacttataaattccagacaccgcttatccctgacctgcacgacgccgcaccgttcgtcaacgaaaccggctctgactccagttcgatggataacatgctggaactgctgctggcaggcgggatggatatcatccgcgccatgcgtctattagtaccacccgcctggcagaacaacccggatatggacccggaactgcgtgccttctttgactttaactccatgcatatggagccgtgggatggcccggcgggcatcgtgatgtccgacggtcgttttgccgcctgtaacctcgaccgtaacggtctgcgtccggcgcgctacgtcatcaccaaagataagctcatcacctgcgcctctgaagtcggtatctgggattaccagcctgacgaagtggtcgaaaaaggccgcgtcgggccaggcgaactgatggttatcgacacccgcagtgggcgtattctgcactcggcagaaaccgatgacgatctgaaaagccgccatccatataaagagtggatggagaaaaacgtccgccgactggtaccgtttgaagatctgcccgatgaagaagtgggtagccgcgaactggacgacgacacgcttgccagctaccagaaacagtttaactacagcgcggaagagctggactccgtaattcgcgtactgggcgaaaacggtcaggaagcggtcggttcgatgggcgatgataccccattcgccgtgctctccagtcagccgcgcattatttacgactacttccgccagcagtttgcccaggtgactaacccgccaatcgacccgctgcgtgaagcgcatgttatgtcgctcgccaccagtatcggtcgtgaaatgaacgtcttttgcgaagcagagggccaggcgcaccgtttaagctttaaatcgccgattctgctctactccgatttcaaacagctcacgacgatgaaagaggagcactaccgcgcagatacgctggatatcacctttgacgtcactaaaaccacgctcgaagcgacagtcaaagagctgtgcgacaaagccgaaaaaatggtacgtagcggcaccgtgctgctggtgctctccgaccggaatatcgctaaagatcgcctgccggttccagccccgatggcggttggcgcgatccagacccgtctggtcgatcaaagcctgcgttgcgatgccaacatcatcgtcgaaaccgccagcgcccgcgatccgcaccacttcgccgtgttgctgggcttcggcgcgacggctatttatccataccttgcctatgaaacgctgggccgcctggtagacacccatgcgattgccaaagattatcgtaccgtgatgctcaactaccgtaacggcatcaacaaaggcttgtacaaaatcatgtccaaaatgggcatctccaccatcgcctcttaccgctgctcgaaactgtttgaagcggtcggtctacacgatgatgtagtgggcctgtgcttccagggggcggtcagccgcattggtggagcaagctttgaagacttccagcaggatctgctgaatctgtcgaaacgtgcctggctggcgcgtaagcccatcagccagggcggtctgctgaaatacgtccacggcggcgaataccacgcctacaacccggacgtggtgcgcacgctgcaacaagcggtacaaagcggcgagtacagcgactatcaggaatacgcgaagctggttaatgagcgtccggcaaccacgctgcgcgatctgctggcaattacgccgggtgaaaacgcggtcaacattgctgatgttgaaccggcaagcgaactgtttaaacgctttgataccgccgcgatgtctatcggcgcgttaagcccggaagcccacgaggcgctggcggaagcgatgaacagcatcggcggtaattcgaactccggtgaaggcggcgaagacccggcgcgctacggcaccaacaaagtgtcgcgcatcaagcaggtggcttccggtcgctttggggttactccggcgtatctggtcaatgccgacgtcattcagattaaagtcgcccagggcgcgaagccaggcgaaggcggtcagttgccgggtgataaagtcacgccttacatcgccaaactgcgctattcggtgcccggagtgacgctgatctccccgccgccgcaccacgatatctactctatcgaggacttagcgcagctcattttcgacctcaagcaggttaacccgaaagcgatgatctccgtgaagctggtttccgaaccgggagtaggcaccatcgcgactggcgtggcaaaagcttatgcggacttgatcaccatcgcaggctatgacggcggcaccggcgcaagtccgctttcatcggtgaaatacgcaggctgtccgtgggagctggggcttgttgaaacccagcaggcgctggttgctaacggcttgcgtcacaagatccgtttgcaggtcgatggcggcctgaaaacgggtgtcgatatcatcaaggcggcgattctcggcgcagaaagcttcggcttcggcactggcccgatggtggcgctcggctgtaaatatctacgtatttgccatctgaacaactgcgcaacgggtgtagcaactcaggatgacaaactgcgtaagaaccactatcacggcctgccattcaaggtgacgaattactttgagtttatcgcccgtgaaacccgcgagctgatggcacagcttggcgtaacacgtctggtggatctgattggtcgcaccgacctgctgaaagagctggacggtttcaccgccaaacagcagaagctggcgctgtcgaagctgctggagactgccgaaccgcatccaggtaaggcactctactgcaccgaaaacaacccgccgtttgataacggcctgctgaacgcgcagttgctgcaacaggcgaaaccgtttgtcgatgagcgccagagcaaaaccttctggttcgatattcgcaacaccgaccgttctgtcggcgcgtcgctttcaggctatatcgcccagacgcacggcgatcaggggctggcagccgatcctatcaaagcgtacttcaacggcaccgcaggccagagcttcggcgtgtggaacgcgggcggcgtggaactgtacctgaccggtgatgccaacgactatgtcggtaaaggcatggcgggcggcttaatcgccattcgtcctccggttggttccgccttccgcagccatgaagcaagcattatcggcaacacctgcctgtatggcgcgaccggtggtcgtctgtatgccgcaggccgcgcgggtgaacgtttcggcgtgcgtaactccggtgctatcaccgtggtagaaggcattggcgacaacggttgtgaatatatgacgggtggtatcgtctgcattctgggtaaaaccggcgttaacttcggtgcgggcatgaccggcggtttcgcttacgttctcgatgaaagcggcgatttccgcaaacgcgttaacccggaactggtcgaggtcttaagcgttgacgctctggcgatccatgaagagcatctgcgtggtcttatcaccgagcatgtgcagcataccggctctcagcgcggtgaagagattctggcgaactggtcaaccttcgccactaaatttgcgctggttaaaccgaagtccagtgatgtaaaagcactgctgggtcaccgtagtcgtagcgcagctgagttgcgcgtgcaggcgcagtaaggggtagcaacaatgagtcagaatgtttatcaatttatcgacctgcagcgcgttgatccgccaaagaaaccgctgaagatccgcaaaattgagtttgttgaaatttacgagccgttttccgaaggccaggccaaagcgcaggctgaccgctgcctgtcgtgcggcaacccatactgcgagtggaaatgcccggtacacaactacatcccgaactggctgaagctcgccaacgaggggcgtatttttgaagcggcggaactgtcgcaccagaccaacaccctgccggaagtttgcggacgagtctgcccgcaagaccgtctgtgcgaaggttcctgcactctgaacgatgagtttggcgcggtgaccatcggcaacattgagcgctatatcaacgataaagcgttcgagatgggctggcgtccggatatgtctggtgtgaaacagaccggtaaaaaagtggcgattatcggcgcaggcccggcaggtctggcgtgtgcggatgtcctgacgcgtaacggcgtaaaagccgttgtcttcgaccgtcatccagaaattggcgggctgctgaccttcggtattccggccttcaagctggaaaaagaggtaatgacgcgtcgccgtgaaatcttcaccggcatgggtattgaattcaaactcaataccgaagtgggccgcgacgtacagctggacgatctgctgagtgattacgatgccgtgttccttggcgtcgggacttatcagtcaatgcgcggcgggctggaaaacgaagacgccgatggcgtgtacgcagcgctgccgttcctcatcgccaacaccaaacagttaatgggctttggtgaaacccgcgacgaaccgttcgtcagcatggaaggcaaacgcgtggtggtccttggcggtggcgacactgcgatggactgcgtgcgtacgtccgtgcgccagggagcgaagcacgttacctgtgcctatcgtcgtgatgaagagaacatgccgggttcccgccgcgaagtgaaaaacgcgcgggaagaaggcgtagagttcaaattcaacgtccagccgctgggtattgaagtgaacggtaacggcaaagtcagcggcgtaaaaatggtgcgtaccgaaatgggcgaaccggacgccaaaggccgtcgccgcgcggagatcgttgcaggttccgaacatatcgttccggcagatgcggtgatcatggcgtttggtttccgtccacacaacatggaatggctggcaaaacacagcgtcgagctggattcacaaggccgcatcatcgccccggaaggcagcgacaacgccttccagaccagcaacccgaaaatctttgctggcggcgatatcgtccgtggttccgatctggtggtgaccgctattgccgaaggtcgtaaggcggcagacggtattatgaactggctggaagtttaagcgaggtaacaatgaattcgccagactgtgtctggcgaatcaaattactgacgaagtgcgcgttgttttctggcaaatgcggcatgagcgtttgacctttcctataatagggataattttcaataaattgtgctttgttcaccaagtctgatgagtgaagcacatcaagcaatttctcatttacaatccgtctcaattacttgttaacacctctgacaataccgattctgcaagctattcagtcttttcattccatgtaaattgtctcgatattaatatacaaaatatgaatataaaaaaccaatatattatccttaattatctatatattttcctatttttcagcgcaaacattcatgtaatgaataattatcaccacaaaccacctcaccagcaccttattattcacatgatcgtaactataaaattcattaaataaatacatcccagcaagttggctatttctgaacgagttatttatttacattcacaaacagatatatatactgcttcagctttttattttaaaaaataaatttgttattaaggatatgttcatatgtttttcaaaaagaacctcacaacagctgctatttgtgcagcactttctgttgcagcattcagtgccatggcaacagattcaactgatacagaattaactatcatcggcgagtatacccctggtgcatgtaccccagttgttacgggcggcggcattgttgactatgggaaacatcataacagtgcgctgaatccgaccggtaaaagtaataaactggttcaactgggccgcaaaaacagcacattaaatataacctgcacagcaccaacgctaattgctgtaacctccaaggataaccgtcagtcgaccattgtagcgttaaacgacacatcctatattgaaaaagcttatgatactctcgtagatatgaagggaacgaaaaacgcctttggtttaggttctgcgcctaatggacaaaaaattggcgctgcatccattggtattgacaggtctaatggtgggattcacgcggcggacgatacaggtgaaattcctgtcgacctgattcaaactgaccactggtcagcagcgacccccacatggaaagcctcatctaatggcgcattctgctcgctgacaagttgctcagcaatcgagcgcggttattctgttgcaaaaacaggggaactgacacctgttgctattacagcggtcaccttcccgttactgattgatgctgcggtaaatgacaatactattcttggttctgatgaaacgatcaaactggatggtaacgtcactatcagcgttcagtatttataagaacttgtaatacagtttttatttttacgcattaaccagttagctataactcggacagattatgccctatgacatggtctgtcttaatcaatctcatcgcaaacagtgcataacatatattaacaatatgtttctgcgttatttatcattattacaggagttttaatttaaatgctcagacacattacattcactgtatttataacaacatcaatgaataccttagccacagggatggttcctgaaacatcagtattgctggttgatgaaaagcgtggtgaagctagtattaatattaagaatacagatgatcatccttcattgctttacaccaccattgttgatttgcctgaaagcaataaatcaattcgtttaatcccgactcagcccgttattcgtgttgaagccggtcaagtacaacaggttcgatttttacttcaggcgactgttcctctgcaatcagaagagctgaaacgcgtaacgttcgaaggtattccaccaaaagatgacaagagcagcagagttactgtttcaattcgtcaggatctacctgtactgatccacccggcttccctgccggaagagcgagagacctggaaattcctggaatggcgtaaaaatggcgaccaaattgagattagcaaccccagtaattatgtcgttcgtatgaccttacaatttaaaacgctcccttcaggaaaaacgggggctataaataagacctattttctaccacacaccagtacaactactgcattaacaaacgctacggatacaaaagtcgagttttacccagccagccgatatggttatcgcggtaataaatatgtcactgacttaaaataactttgcctggagcgacaaggatgttaaaaaaaacgttactggcctacaccattggttttgccttttctcccccagccaatgcagatggtatagagattgccgctgttgattttgatcgggaaacattaaaatcactaggtgtagatcctaatatatcgcattatttttcccgttcagcccgttttttgccaggtgaatattcactgatagtatcagtaaatggcgaaaaaaaaggcaacattgctacgcgctttgatgaaaatggcgacatttgtcttgatcaggcatttctgcaacaagccggtttaaaaattccttctgaagaaaaaaatggctgttacgactatatattgtcctacccgggtaccacaatcacaccattacctaaccaggaagcgttagatattatcgtttcaccacaggcgatcattcccatagggttggatctcacaaacgcagcaactggtggaacagctgcgctgctaaactactctctgatgagcagccgtgcagaattttctaatgggagttcggactactcccaggctgcacttgaaggcgggattaatattaatgactggatgttacgcagccatcagttccttacacaaacaaatggcacattcagtaaccagaactcgtcaacctaccttcaacgtacctttacagatcttaaaacactcatgcgagcaggtgaagttaacctcaataatagcgtgttggaaggagccagtatttacggtatcgaaatcgcaccggacaacgcattgcaaaccagcggcagtggtgtgcaagttactggtatagccaacacctctcaggctcgtgtcgagattcgtcaacaaggagttttaattcattccattctggttcctgcgggcgcattcactatccctgatgtacctgttcgcaatggtaatagtgatcttaatgtcaccgttgtcgaaacagacggtagttcgcacaactatattgttccctccaccctgtttaatcagcatgtagaaagcttccagggttatcgcttcgcgatagggcgggtagacgatgactatgacgaatcaccttgggtaattagtgcatcgagcggatggaatctgacacgctggagtgcaatgaacggcggcgttatcgtagcagaaaattatcaggcggcatcaatccggtcgagtctggttcccctgcccgatttaacagtgagcagccaaattagtacatcgcaggatacgaaagactcactgcaaggacagaaatatcgtcttgacgcgaactacaatctcccattttcacttgggctaacaaccagcctcactcgatctgatcgccattatcgcgaactgtctgaagcgattgatgatgattataccgatccgactaaaagcacttatgcgcttggtttaaactggtctaactccattctgggtggtttcaacatcagtggctataaaacatatagttacgacggtgacaatgactcaagcaaccttaatattaactggaacaaagcgttcaaacacgccacggtttccgtcaactggcagcatcaacttagtgcttcagaaaataatgaagacgatggtgatctgttctacgtcaacatcagtattccatttggcagatcaaacaccgccacactgtatactcgccatgacgatcataaaacccactatggtactggtgtcatgggagtcgtctcagatgagatgtcctactatgtgaatgctgaacgagatcacgacgaacgtgaaacgagcttgaacggcagtatcagttccaatctccattacacccaagtcagccttgccgcaggagcaagcggcagtgatagccgtacttacaacggtacgatgtcaggtggtattgccgtacatgatcagggagtgaccttttcaccgtggactatcaatgacactttcgccatcgcaaaaatggataacaatattgcaggtgtcagaattacatctcaggcaggcccagtatggacagattttcggggtaatgccgtcattccatcaatccagccgtggcgaacatcaggagttgagatcgataccgccagcttgccaaaaaatgtcgatatcggtaacggcacaaaaatgatcaaacaaggccgtggtgcagtagggaaagtcggattcagtgcgataacacaacgccgtgcattactcaatatcacactttccgacggcaaaaaactgcccagaggcgttgcgattgaagatagtgaaggcaactatctgacaacatcagtggatgacggtgttgtattcctcaataacatcaaaccggacatggtgctagatataaaagatgagcagcaatcatgccgtattcaccttacattcccagaagatgcaccaaaagatgtgttctatgagacagcaacaggagagtgccaatgaaacggataataacaggatgcctgctgctgaacttcgccatggccgctcaggcagagtgtaatatctccagtagcatacaaaatatcgactatggcaaacgaagtgctgccatgcgccaagttgaccggggtaaaacaacacaattagcagacagaacaatcacgctggtaatgcaatgcgatcaggacgctcatattcgtgttcagttgaataccgctaatatttccaacaacggatttggatttggcccgaatggttcattaaatctgatcgccagcgatgcattttcaggtagtaacaatctcgacctggcgttagccagtggcaaaaatgacaatccgggcagcacaggaacagcatcaattagggaaggtgcgaataagcggggaaattcttctcggctgactcagtcatttcatttcttcatgtttgagccgattttttctcccgtaaatgccttgaatcagcctatttagaccgtttcttcgccatttaaggcgttatccccagtttttagtgagatctctcccactgacgtatcatttggtccgcccgaaacaggttggccagcgtgaataacatcgccagttggttatcgtttttcagcaaccccttgtatctggctttcacgaagccgaactgtcgcttgatgatgcgaaatgggtgctccaccctggcccggatgctggctttcatgtattcgatgttgatggccgttttgttcttgcgtggatgctgtttcaaggttcttaccttgccggggcgctcggcgatcagccagtccacatccacctcggccagctcctcgcgctgtggcgccccttggtagccggcatcggctgagacaaattgctcctctccatgcagcagattacccagctgattgaggtcatgctcgttggccgcggtggtgaccaggctgtgggtcaggccactcttggcatcgacaccaatgtgggccttcatgccaaagtgccactgattgcctttcttggtctgatgcatctccggatcgcgttgctgctctttgttcttggtcgagctgggtgcctcaatgatggtggcatcgaccaaggtgccttgagtcatcatgacgcctgcttcggccagccagcgattgatggtcttgaacaattggcgggccagttgatgctgctccagcaggtggcggaaattcatgatggtggtgcggtccggcaaggcgctatccagggataaccgggcaaacagacgcatggaggcgatttcgtacagagcatcttccatcgcgccatcgctcaggttgtaccaatgctgcatgcagtgaatgcgtagcatggtttccagcggataaggtcgccggccattaccagccttggggtaaaacggctcgatgacttccaccatgttttgccatggcagaatctgctccatgcgggacaagaaaatctcttttctggtctgacggcgcttactgctgaattcactgtcggcgaaggtaagttgatgactcatgatgaaccctgttctatggctccagatgacaaacatgatctcatatcagggacttgttcgcaccttccttagtacttcccccaataattggctggtgtttatgcaaaatggtcaagaagtggtaattgatagcggtaaaagcgttagcctcacactgacaatggctccagcttttaaggatgaaggggaactaaccgacatgacagatattacaggcaatctgacggtcctggtggaggcaaaatgaacaatgtaaaattactgattgccggaagtgccttttttgccatgtcagcgcaagccgctgatagagtatcaattgacgttaaggtgactctggaagctgcagcttgtactccaatactaagcaacggcggagttgttaacttcggtagtcattcagtcaatagactttcaacgcagcactacacacagattggaacacgtaatattaatatgactataacttgcgaatccgctaccggcattgcgattaccgctcgtgatacacgaatggatagtatgaccaccggaaaagatagtgggggtcagagtggtgtaaaatataccttaaatggcggaggttatattagccagacaacgcgcttattcggcttagggaaaacaaaagataataaaaatatcggtagttatgccgtgttaattgatagcaacaacattagtgccagcaatggtagccagacgttagctgtatcaatagcaggtgcagatgccgtcataacagggcaaaaaagagcatggcaaacgctcaccgcttatccgcttgcagtcgatcaaagctattattacacctttgtaaaaccaggtgaaacaaccccaactcctgtaacgaacgccattataccgcttcaggtgagcgcatctatcgcgaatgatttaggcggttcagaaaaaatcgaacttgatgggaaagctgtgataagcgtagtctacttgtgataacaatgccggacaggagtactatcaggcattcgttttatacgatcggttaatgtttcaggaaagctcttcgcatatcttggggaaagtaaatgtaatacgctgttcttaattgttcagtgctcaccccccagagtatagctcattccattattcaacttagctccatataaagggacagataatggaatcgctctcagaaggaaccacagcaggctaccagcaaatccacgacggtattattcatctggtcgatagcgcccggacggaaacggtacgtagcgttaacgcgttaatgaccgcgacgtaccaggaaattggccgacgaattgtcgaatttgaacaaggtggcgaggccagggctgcgtatggtgcgcagctaatcaagcgactatcaaaggatttatgtctaaggtataagcgtgggttctctgcaaaaaacttacgccaaatgaggcttttttacctcttttttcaacatgttgaaattcaccagacaatgtctggcgaattaacaccattgggaattccgcagacaccgtctgcagaattcccatcggcaaagatttggcagacgctgtctgccaaatctttccccttgcccaggtccacctacgtccgtttactttccgttaaaaacgctgacgcccgcagcttttatgaaaaagagacgctccgctgtggctggtctgttcgccagctagagcggcaaattgcgacccagttttatgagcggacactactgtcacatgacaaatcagccatgctgcaacaacacgctcctgccgagacgcatattcttccgcaacaggcgatacgcgatccctttgtgctcgaatttctggaattgaaagatgaatattcagaatccgattttgaggaggcgctgatcaaccacctgatggatttcatgctggaacttggggatgattttgcctttgttggtcggcagcgaaggttacgcattgatgacaactggtttcgtgtcgatctgctgtttttccaccgccgtttacgctgcctgctaatcgtcgatctaaaagtgggcaaattcagctatagcgatgccggacagatgaatatgtatctcaactacgccaaagagcactggacgctaccggatgaaaatccgcccatcggtctggttctctgtgcagagaaaggagccggagaagcgcattatgctctggcaggtttgcctaacaccgttctggcaagcgaatataagatgcaactacctgatgagaaacgactcgcagatgaactcgttcgaacacaggcggtgctagaggaaggctatagacgccgttaatttcagcggtttcgaattctgcagacagtgtctgcagaatctttaaaacgaactaagttttaagccattaaatcagccttaaccttcaccacaacctttttaatctctccaggctcgccgacaacgcatcctggtttatgcggttcacctggcataaacacggcgaacattcccggttttaagatgatggcttgctcgttatcaatggtgctgcaaagctgataatcatcctcatggtggaactcttcacactgacgcgcagtgcctgccatgccaaacagaatccgttcctcaccgtttaataacagctggatatcaatgtattgctcgtgcaattccgcttttttctcgacgggcgattgagtgttaaacgtcatgacattcataaagatattgtcgccctgtaattcgtaacgacccggcgctttttcttgcggtctggcagctaatgccagcgttaacgcgtcctgtaacgcaggatgtaacccagcagacggtaatgactgtacttcacccatcatcataatttttctccctgggccaacagcgcagccccaagtaaacctgcatcatggcggtaatgcgccgccagtaaatcaacatgaaatgccgctggctcctgcgccagatacgtttccaccagcgccagatacccttctgccagaccaacgctgccaccgaccaccacgcactggcaatcagttgtggctttaatatcagcgatcagccttgcaagcgtacgtgcggagcggtgaatcagctgctgcgcctgctcgtcaccctgcccggcgcgcgtgaaaatagttttcgcatccgcgccagccaactccccctgcgctgccgctgcaatgccgcgaccagaagcaatcgcttccacgcaacctgtgcgtccacagccgcagactgggccgtgtggatcggcaagcgtatgcccgatatgccccgccagaccgccagggccggtaagcagtttgcagccgctcactacaccgccgccaacgccggtggaaacggtgataaagaccatatcggttatatcgccatccagcgcctgaaactccgcccatgctgcggcctgcgcgtcgttaatggcaatggtcggcaaattggtaagttgttccagcgttttgactaacggaaagtgtagcaatccaccaagattatgcggattaagcgccagcaagctgccgtcacggattatcccggtcgaagcgatggcaacccgctgcgcatgagcttgcaacggagagactaatgcggataaggcatcacgcaaggcttctggtgtctggctggctggcgtaggaagttcacgacgatcgcggatctgcccgtcagcgccaatcagcgcggcggcaagtttagtaccgccgatatcaatcgccagtgtggtcatagcaccgcctttttcatcgctgtgttgtaccactgacaaatgtgctcaagacgcgtgattgcagaaccgaccgtcaccgcccacgcgccgtggcgcatcgcatccgccgcctgagcaggcgtgttgtaacgcccttcggcaatcacccgacatccggcgtcgctcaacgttttcaccagcgccagatccggctcttctggcgtttcaggcgtggtatagccagaaagcgtagtgccaataatttcggctcccagcttttggcatgccaggccgtcttccggcgttgagcagtcggtcatcgccagtaaaccgtgatggtgaatacgtgccagcagcgtttcaacaggcaccggacgcgggcggtcggtgccgtcaatggcgataatgtccgcgcccgcctgcgccagcgcatcaacatcttcaatataggccgtgatgcgtaccggagaatcctccagatcgcgtttcacaattccaataatcggcacgctcaccaccgcacgcgtggcttgcagatttgccacaccttcaatgcgaatggcaaccgcgcccgcctgttctgccgctaatgccatggcggcgacgatttcgggtttatcgagcgggctgtccggaaccggctggcaggagacaatcaggccaccgttagcagcgattttttgatccagttgtgcaagtaacgacatacatcttcccttagcgaaaggcccggtacatagaccgggcaacaggattaacttttggttttgactaaatcgtttttggcgctgccaaacggcacggcaccgctgaatggtttaccgtcgatagcgtcatgagtacgcaacgcttccgggcgcaaccaacgctgaacgcgagaaggcatatccagcccaatcagcaggatcaccacgaacgtcagactgaacgagagcgatgccagcgcagtacccagatccagacgttgagcgatcaacgcgccgatgattggggccagtgcaccgcccaatgcgccaacgttgtaggtaaagcccaggcccgctgcacgctggtcggtatcgaaataaccgccaatcagttttggtaagatcccggcgatcccttgtccaagcatttgctggaagaacagtaacagaccgagcacccagacgtttgcgccgccaatcgcaaataccggaataatcagcagctgcgaggccagcaggctacaaacgtacgctttgcgggttcccagccagtcaccgaggaagccacctacgcagcatcccaccgccgcgccaaagccactaaagaacagcacattggctacagtatgcgggttataagccagatcggttttcagatacgttggcagcagcgcctgaatcggccatgagtagaggaaagcaaacaacacgaccaccatcagcattacgcccgttggccagcgtttgcctgcactctgcaccataaagctgataaagattgcggcgcataacagcccaagaacagcgacgatcgcggcattttgcaggttaccggcgaagcagaaccacagcgcagtagccgccgccagtgtcattacgatattggcaatgcgatgttcaccacggtagagaatatccaccattgtgcgtactggtgctttacctgcgtgtttctctttccagtcttccgcttccgggatgtttttacgcagccagagagcaaagatgattggcaaaatgccgataaagaacagcgcacgccagccccagaccggaaccaccaggctatagacctgagcggcaacgacggcccccacagagaagcctgaaatcaaaaaaccactggctttgttacgcagatgttttggccagctttcaatgacataggtggcgctggaaccgtattcacccgccatccccatgccgatgaccagacgagcgataaacatggtgatgtagcctggcgcaaagccgcaggccagcgtcccggccgagaagagaacgatgctggtgaccattgccagacgacgcccgtagcggtcacccatagcgccgagcatcaggccgccgaaccagcgagagataaaggctgcagagatcagacttgccgcctgcaccgtcgtcagcccgaattcaccttgtacttcggtgagtaccagggcgattaaaacgaaatcaaaaccgtcaagcagatatcccaaccaggcagcggaaaatgcgcgccattgtgcacggttgagatggcgataccacgggatattctgggttgtagtactcattgtgagtctcccgcggtgggcgatgcccacacgctttggtatgaaaattgtagggtacagatgcgtttatttcccctcacccggtaggggcgagcgaggggaaacaactcacccgcgctcttgcatcaactgctgggccagcgccttcagttctggcagatatttttcatctaccggtccaaacggtttgcggcacagcggcacagaaacgacatccatataatggaggacagttttcaggccgcggaatacgcccgttttgatcagtaaatcaatgactttattgcattcagtttgcagtttctgcgcggtctggatatcgccttctttcagcgccttaacgatcccctgatagcgccagcccatgatgttgtaggtactgccgataccaccatcagcgcccgccagcagaccagaggcgaagatttcgtcgtaaccgttatagagcacaagatcaggatgttcacgacggatctgctccatctgatagagatcgccagaggtctgtttcagcgcacctacgccaggcaatgtaacaagtgtgttgatctgatccagggtcagttttaccccactcagggctggaatgttgtacaccaccatcggcaaaccatccgccgaatcaataattgcccgatagtgatcgcagtgttcttcaaagctgaaaggatagtagaacggcgtgacggcggagacggcatcgaagccataacgtttagccgatgccgcaagttgttggctttcggcggtgctgacgcaaccgacgtgggcgatgagtttaatcttacctttcgcctcttcggcgacgatttccagtacctgttcacgctcggaaaggctttgtacaaaggcctcgccggtcgaaccacccacgtataaaccgtcgatgccctgctgaatattgaactgaaccaggcgacgcagactcgctttatccagtgcttgttgttggtcaaaaggagtcaggagtgcagccattacgccacgtaaattcgttgccataaatacctctgaagtgatgcttgtctgataaacgatatacctttatacctgttataccagatcaattaagcaacaccccatacagaaagcttataatgcgatctgcttcactaaagtggcattatttctttttgttggtggtctgaccgaaagcgtgccaggtagcagagacgctgttgagatgcgattgcaacgcacgatcggcttcgtcaggatcatgacggcggatcgcatcaacgatcgcaatatgctgttgataactaacgttgttatgttcgtgcagtgcctgatcggtaaccgttgggcgtgcggcaataagccagtcgagcagggcaacgtggatcgccatgaagattgggttaccggggatctccgccagcacgcggtggaaatcaacgtctgaacgaatgaatgccgcgttgttatccagcgactgactgttgatttccagtgcttttgccagcaaatcgatttgctcatcggtggcatgttcagccgcatagcgcaccagactggattcaaagaacagacgtaattgttcgaaatgggcaatcccaccgggatgagaaaggaaatctttcgccatgccggaaagctcaccgatgatagtgtccgcagaaggacgcgagacgcgagcgcgttcgccgttgtttatttgcaccagacctttgcgttttaacgctgccagcgcttcacgcaccgaaggacgcccgacgttaaagaacgccatcagttcgcgttcagacggtaattgttcaccttcgccaaattcacgacggcggatcatctgttccagctcttcttccaccatttcggagagttttttacgcgccagcgggcggctacgcaagttgcgaccaattgcaggtgaagaatcttcggtttgcgaatcaaatgcgttcataaggcccattctgtaaggtcagtgtgattaacatcatcagtgacatcctatcacaggattgaaagtaggggaaaatggcagggttttctctttgtgcctcatcattaccataattaacggaataattaactattgcgaaaaattaatgtaacgcagataaaaacatcccgtttgaattatttataagactattcacgagcattatgaatattatgaatgtgttcttacaaaataatcataagcgcatattttttaatgaaaaatcacctcacctacaattaaaaacacgacatccgcaccataaatagccttgcaaaaaatataacatcgttgttttcaatctgccgtttatgggattgaccgttttcttttgacacggagttcaacaatgttcggcataattatatctgtcatcgtattaattacgatgggctatttgatcctgaaaaactacaaacctcaggtggtgctggctgccgcaggtatcttcctgatgatgtgcggtgtctggttagggttcggtggtgtactcgatcccaccaaaagcagcggctacttgatcgtcgatatttataatgaaatcctgcgcatgctgtccaaccgcattgccggattggggctgtcgattatggcggtgggcggttatgcccgctacatggagcgcataggggccagtcgcgcgatggtgagcttgttaagccgcccgttaaaactcattcgctcgccgtatattattctgtcggcaacttacgtcatcggccaaatcatggcgcagtttattaccagcgcctccggtctgggtatgttgctgatggtcaccttatttccgacgctggtgagtctgggagtaagtcgtctctctgcggtggcagttatcgcaaccacgatgtccattgagtgggggattctggaaacgaactccatttttgctgcccaggtagcgggaatgaaaattgccacatacttcttccactaccagcttccggtcgcctcttgcgtcattatctcggtggcgatctcccactttttcgtgcaacgcgcttttgacaaaaaagataaaaatatcaatcacgaacaggcagagcaaaaagctctcgataatgtcccgccgctctattacgccattttacctgtgatgccgttaatcctgatgctcggctcgctgttcctcgcccacgtcgggctgatgcagtcagaactgcatctggtggtggtgatgttactgagtttgactgtgacgatgtttgttgagttcttccgcaagcataacttgcgcgaaacaatggacgatgtgcaggcgttttttgacggcatgggtacgcagtttgccaacgtggtaacgctggtggtcgcgggtgaaatatttgcgaaaggcttaacgacgattggcactgtcgatgcggttatcaggggggcggagcattctggtctgggcggtattggcgtgatgattattatggcgctggtcattgccatttgtgccattgtgatgggctctggcaatgcgccgtttatgtcatttgccagtcttattccgaatatcgcagccggactacatgtaccagcggttgtaatgattatgccgatgcattttgccacgacgctagcgcgcgcggtttcgccgattactgcggtggtggtcgttacgtcaggaattgcaggcgtttcgccttttgcggtggtgaagcggacagcgatccccatggcagtcggtttcgtggtgaatatgattgccacaatcacgctattttattaagtcattaaaaagacaaaacaggccgcctgggcctgttttgtattacttcacaacgcgtaatgccggtcgaccaccgcgtggtggctgcggaggttcatcgtcaggatgagtgtcatcatcgtgatctggcttgtcgccatcaataaccgacataacggtttcgttgtctgccgatgcctcttcatcattcatgatgctggtatcttcatcgtaggcagcttcaggctcaaacatcgtgcctgcgccattttcacgggcgtagatagccagcacggcagccagcggcacagaaacctgacgcggaatgccaccaaagcgcgcgttaaagcgcacctcatcattcgccagttccagattgccgacagcacgcggcgcaatgttgagtacgatttgcccgtcacgcgcatattccataggaacctgcacgccagggagcgtcacatccaccaccaggtgcggcgtgagctggttatccagcaaccactcatagaatgcacgcagcagatagggacgacgtggtgttagctgtgacaaatccatacagattaactccggcccagacgcatttcacgttctgcttcagttaaagaagcaaggaaagagtcacgctcaaagacgcgggtcatatagcctttcagctctttcgcacccgggccgctgaactcgatgcccagttgcggcagacgccacagcagcggagcaagatagcaatcgaccaggctgaactcatcgctcaggaagtacggcttctgaccgaagaccggcgcaatcgccagcagttcttcgcgcagttgcttacgtgcggcatctgcttcagaagctgaaccgttgatgatggtgttcatcagcgtgtaccagtctttttcgatgcgatgcatgtacagacggctttcaccgcgagctaccgggtaaacaggcatcagtggcggatgcgggaaacgctcatccagatattccataatgatgcgagattcccacagggtcagctcacgatccaccagggtcggaacgctctgattcgggttgaggtcaatcagatcctgaggcggattgtccttttccacgtgttcgatctcgaaacttacacctttctcagccagcacaatgcggacctgatggctatagatgtcagtaggaccggaaaacagcgtcattaccgaacgtttgttggcagcgacagccatgaaaacctccaggtatagtcagaatttttactgctaccagccaccaggtggccagtcagaagttgtgttacccaataaggaacgactctctttgttcgaaaatcaaacaaaaaatgagcaatacccgacatttgggcagaaaattggatgatagtttaccagattttgcgaccattgtggtgagtcgatgccggaaatggggaaaaagagatgcgctttagtctgaaatagttgacttagtcccttattggcgatgtggtttttgttttacctgtctgtcaggtggcagcaaaaagcaactttccagtttttacgctgattcagattttagctataaaaaaacccgccgaagcgggttttttcgaaaattgttttctgccggagcagaagccaattaacgtttggagaactgcggacgacgacgtgctttacgcagaccgactttcttacgttcaacctgacgagcgtcacgagtaacgaagccagctttacgcagttcagaacgcagggactcgtcgtattccatcagagcgcgggtgataccgtgacggatcgcaccagcctgaccagagataccaccacctttaacggtgatgtacaggtccagtttctcaaccatgtcgaccagttccagcggctgacgaactaccatgcgggcagtttcacgaccgaagtactgttccagagaacgttggttgattacgattttaccgttgcccggtttgatgaaaacgcgagctgcggaacttttgcggcgaccagtgccgtagtattgattttcagccattgcctataatcccgattagatgtcaagaacttgcggttgctgtgccgcgtggttgtgctcgttacccgcgtaaactttcagtttacggaacatagcacgacccagcgggccttttggcaacatgcctttaaccgcgatttcaatcacacgctcaggacggcgagcaatcatctcttcaaaggtcgcttgtttgataccaccgatgtggccggtgtggtgatagtacactttgtcagtacgcttgttgccggttacagcaactttgtcagcgttcagaacgatgatgtaatcaccggtatctacgtgcggagtgtattccgctttgtgcttaccgcgcaggcgacgagccagttcagtagccagacggcccagagttttaccggtcgcgtcaacaacataccagtcgcgttttacggtttctggtttagctgtaaaagttttcattaaaagcttacccaataaatagttacacgttggtgaacacccaaacgtcttcaattgttgaggttcacacgacaaagtccggcaaacctaccccttcgaatagcctatgccagcacacaaaaagttttgggaaaaaaactttcttgtaacgtggggtcgcaggattatagagaagtcggggtcaaagatcgacccctttttgtgatttgtgacaggttttaacccgccaaatgctcgcgcttcagatactcttcgctttgcatctcttgcagacgtgacaggcaacgctggaactcaaacttcagccgatcgccctgataaatttcatacagcggcacttctgcactcaccactaatttgacatggcgctcgtaaaactcatccaccagcgcaataaagcgccgcgcttcgctctccatcaaccgcgtcataactggtacatcaaacaacatgaccgtatgaaagagacgtgagagcgcaatatagtcatgctgactgcgggcgtcgacgcacagcgtagtaaaagagaccgccagcgtctggttctcgacgcccattgttgctaatggccgatggttgatttctaacgtcggtgaattttctcgtttcccccccgccagcgccaaccatagtttatccatttgcgcccgggtttcatcgtgaagtggcgaaagccacagatgcgcctgagtgagtgtacgcagacgataatcaacaccagcgtccacgttcattacatcacaatgctgtttaatggcatcgattgcaggcagaaaacgcgcacgttgcaggccatttcgataaagttcatccggcggaatatttgacgtcgctaccagggtaataccgcgagcgaacagggctttcatcagaccgccaagtagcatggcatcggtaatatcagaaacaaaaaattcgtcaaaacagagcacgtcagtttcggctttaaagcgatcggcaataatttccagcggatcggtctgcccctgtaaggcagttagctcttcatgcacccgcagcataaaacggtgaaagtgcaggcgctgtttccgctctcccggcaggctttgatagaaaaggtccatcagccaggttttcccgcgtcctacaccgccccacatatataagccacgcactggcgtatgctttgtgtcttcgcgtttaccccacagcttaccgacccgcgccattagcccactcgtcctgggggctggtggcgtgctattgatgagttcctgataaataatttccaggcggctgacggcctctttttgaacgtcgtcgggttgatggctgccttcattaagcgccttcaggtattgcgatgttggggtaacgctttgcatgatcttattgttattccttgaataatcggtgcgccgttgttcacggttgacgaaaaaaaggccgttctacactacgcgatatgcagtcgggattccacttctgtggaattaacggttatagtggcataatcagccgcaggcatggagcctgaagccaacaccctacggaaacaaaagacaacgggagatgttcatgacctgggaatatgcgctaattgggttagtcgtcggcatcattattggtgctgtggccatgcgttttggtaatcgtaaactacgccagcaacaggcgttgcagtacgaactggaaaagaataaagctgaactggacgagtatcgcgaagagctggttagccactttgcccgcagcgcggaattactggataccatggcgcacgactatcgccagctgtatcagcacatggcaaaaagctccagcagcctgctgccggaactgtctgctgaagcaaacccgttccgtaatcgtctggcagagtctgaagccagcaacgatcaggcaccggtgcagatgcctcgcgactattctgaaggcgcatccggcctgctgcgtactggcgcgaagcgcgactaatttatttttcgggcgcagccattgcgccctcctcttctctccctccccgactatcatttaatctggtgtctcattgttagccgtctgaaaattcaataacatcaaactgttttgaatctcttttcttatcattcaggtacgagagcaggaataatgaaaaaacaaacccagctgttgagtgcattagcgttaagtgtcgggttaactctctcggcgtcatttcaggccgtcgcgtcgattccaggccaggttgccgatcaggcccctctccccagtctggctccaatgctggaaaaagtgcttccggcagtggtgagcgtacgggtggaaggaacggccagtcagggacagaaaatcccggaagaattcaaaaagttttttggtgatgatttaccggatcaacctgcacaacccttcgaaggtttaggctccggtgtcatcatcaacgccagtaaaggctatgtgctgaccaacaaccatgtgattaatcaggcacagaaaatcagtattcagctcaatgatgggcgcgagtttgatgcaaaactgattggtagcgatgaccagagcgatatcgccctgttacaaattcaaaacccgagcaaattaacgcaaatcgctattgccgactccgataaattgcgcgtcggtgattttgccgtagcggtcggtaacccatttggccttgggcaaaccgccacctctggcattgtttccgcattaggccgcagcgggttgaatcttgaaggtctggaaaactttatccagacagatgcttccattaaccgcggtaactccggcggtgcactattaaaccttaacggtgagttaattggcatcaacactgcaatccttgcgcctggcggcgggagcgtcgggattggatttgccatccccagtaatatggcgcgaacactggcgcagcagcttatcgactttggtgaaatcaaacgcggtttgttaggcatcaaaggcaccgagatgagtgccgatatcgccaaagccttcaaccttgacgtgcagcgtggcgcgtttgtcagcgaagtgttgccaggttctggctcggcaaaagcgggcgtcaaagcgggcgatattattaccagcctcaacggcaaaccgctgaatagctttgctgagttgcgctctcgtatcgcgaccaccgagccgggcacgaaagtgaagcttggcctgctgcgtaacggcaaaccactggaagtagaagtgacgctcgataccagcacctcttcgtcggccagcgctgaaatgatcacgccagcgctggaaggtgcaacgttgagcgatggtcagctaaaagatggcggcaaaggtattaaaatcgatgaagttgtcaaaggaagcccagctgctcaggctggcttgcaaaaagacgatgtgatcattggcgtcaaccgcgatcgggtgaactcgattgctgaaatgcgtaaagtgctggcggcaaaaccggccatcatcgccctgcaaattgtacgcggcaatgaaagcatctatctgctgatgcgttaatgtcgtaaaccgggcatcaggcttacgtgtgatgtccggttaactcgtggtatgctgctgccgttcccttttttaatgacgcctccatcatgtttgtgaagctcttacgttccgttgcgattggattaattgtcggcgctattctgctggttgccatgccttcgctgcgcagccttaacccgctttccactccgcaatttgacagtaccgatgagacgcctgccagctataatctggcggttcgccgcgccgcgccagcggtggttaacgtttacaaccgtggtttgaacaccaactctcacaaccagcttgagatccgcaccctgggatccggtgtaatcatggatcaacgcggttatatcatcaccaataaacacgtcatcaacgacgccgatcagatcatcgtcgccttacaggatggacgtgtatttgaagcattgctggtgggatctgactctctaaccgatctggcggtacttaaaattaatgccactggcggtttacctaccattccaattaatgcacgtcgcgtaccgcacattggcgacgtagtactggcgatcggtaacccgtacaacctcgggcagaccattacccaggggattattagtgccacgggtcgaatcggtctgaacccgaccgggcggcaaaacttcctccaaaccgatgcttccattaaccacggtaactctggcggcgcgctggtgaactcgctgggcgaactgatgggcattaatacgctgtcgtttgataagagtaacgatggcgaaacgccggaaggtatcggctttgcgattcctttccagttagcaaccaaaattatggataagctgatccgcgatggtcgcgtgatccgcggctacattggtatcggcggacgtgagatcgcaccactgcacgcgcagggcggtggtatagatcaactgcaagggatcgtggttaatgaagtgtcacctgacggcccggcggcgaatgcgggtattcaggtcaacgatctgattatttcggtggataacaaaccggccatctctgctctggagacgatggatcaggtggcggaaattcgccctggttcggtgatccctgtagtagtgatgcgtgatgataagcagttaacgctgcaggtcaccattcaggaatatccggcaaccaattaagtcgtgcgctcaaaacaaaaaaccggagtctgtgctccggttttttattatccgctaatcaattacttattaacgaactcttcgcccagggcgatatctttcttcagcgtatccagcataccttccagcgcgttctgttcaaatgcgctcagggtaccgatagatttacgctcttccacgccgtttttacccagcagcagcggttgagagaagaaacgggcgtactgaccgtcgccttcaacgtaggcacattcgacaacgccttgttcgccctgcagtgcacgaaccagagacagaccaaaacgtgcagctgcctggcccatagacagggttgcagacccgccaccggccttcgcttcaaccacttcagtacccgcgttctggatgcgtttggtcagatcagccacttcctgctcggtaaaactaacgccaggaacctgtgacagcagcggcagaatggtaacaccagagtgaccgccaataaccggcacttcaacttcgcctggctgtttgcctttcagttccgcaacaaaggtgttggaacgaatgatatccagcgtggtaacgccgaacagtttgtttttgtcataaacaccggcttttttcagcacttcagcagcaattgcaactgtggtgttaaccgggttagtgataataccaatgcacgctttcgggcaggttttcgcaacttgctgtaccaggtttttcacgatgccggcgttaacgttaaacaggtcggaacgatccatacccggtttacgcgctacgcctgcagagataagaacgacatctgcgccttccagcgccggagtcgcatcttcaccagaaaaacctttgattttcacagcagtagggatatggctcagatcgacagccacaccgggagtcactggagcgatatcatacagagagagttctgaacctgaaggcagttgggtttttaacagtagtgcaagcgcctggccaataccgccagcagcgccgaggactgcgactttcatcctaaactccttattatattgataaactaagatatgttgctccgctgccgcgaccttaatccacaaaattgccgtttacaatgaccacatctcaagaatgtgtagtcacgcaagtttagcgtttatgcatttaattgccgtaatcaggaacctaacttacgtaattaacagtcgcttatgcattagcgcaacattccaacaggtggtgacaatataccctaccgttcagccaaaacaacatcaatttgataacaattaatttacttttaagcagaatttgcatgccgtgacgcaggcatgtttctcaataacgaaatttgataaaatcccgctctttcataacattatttcagccttcttcagggctgactgtttgcataaaaattcatctgtatgcacaataatgttgtatcaaccaccatatcgggtgacttatgcgaagctcggctaagcaagaagaactagttaaagcatttaaagcattacttaaagaagagaaatttagctcccagggcgaaatcgtcgccgcgttgcaggagcaaggctttgacaatattaatcagtctaaagtctcgcggatgttgaccaagtttggtgctgtacgtacacgcaatgccaaaatggaaatggtttactgcctgccagctgaactgggtgtaccaaccacctccagtccattgaagaatctggtgctggatatcgactacaacgatgcagttgtcgtgattcataccagccctggcgcggcgcagttaattgctcgcctgctggactcactgggcaaagcagaaggtattctgggcaccatcgctggcgatgacaccatctttaccacccctgctaacggtttcacagtcaaagacctgtacgaagcgattttagagctgttcgaccaggagctttaatctctgccccgtcgtttctgacggcggggaaaatgttgcttatccctctcaaccccctgctttcccctgcgattaatttaacgaatagtgcgttttactgcgacatgtcattcacacaatgaatacataaggtaaaaaaagcacattatgcaaaattcattatctaattgaaaaaactagaattaacgataaataaccgtatttttaattcttttttgttattaaaattcacatttttaacacttagtatcaactgaaacagttagcgcggtattaattagctcaataattagtgtatacttgattttgtgatatgggtcacgaaacaaaggcccagctaaaagattatgtcgaggtaaaaatcatgaaaatcaaaaccactgttgctgcattaagcgtactttctgttctctctttcggtgcattcgctgccgactccattgatgctgcacaagcacaaaatcgtgaagcaatcgggaccgtatccgtaagtggtgtggcgtcttcgccaatggatatgcgtgaaatgctgaacaaaaaagcggaagagaaaggcgcaacggcctaccagattactgaagctcgtagcggtgacacctggcacgctacggctgaactgtacaaataaaccctcatcgtcttgtccgacgatattgcccccggttcgggggcttttttttgcgctaatgacgaacattaaaacgcaaatgcccttccagctcttcctctgcctcatcaaacagcaatattaacgcgccaaaacggcgacgcgttttctctcccagatgaacaaattcaatctcaagtggtagcggcaggacatcgttcattaacacatcccatagtgagtcgagatcgcgtaccttatctttcgccagaccaaaggtttggctaaagtcacgataaaaatcctcctgactctcaatctcatcaaaatcaaaggtataaatattcatctgttgccaccgtcacgtttcgcggcgagttctgccgtgcatcgctaagtatagccatgaaaaaaccgacgcttttggcgtcggttttgacttaactatcggtcaacgcatgttgatacttatggagcatccccgccagccgatttaccggttccgtcacctgcggtggcgcttgccagatgcgtagcttttcctggtagatttccagttcttccagcaactggccaaagtaccgacgacgtttatcatcgctacgggcagatatcacatggtctgctgtgcggcgcatttgtcggtgaaacgccgataaatcctcgttaaccgggatcggtgcatcacgcaggcgctggtgcgcgataatcatcgtcagcgccaggcgaaatttcggcaaatcccctgggaacttattcatcagcaaaaacagctgctgataaagtgccgggaggtggttctctttacgacgtgccacattggtagtcatcgcggaaacagcggcagaaacaaactgattaagcagtacacgtccggtcctgtcgcgcgatttatcccgcaccagcaaaataacggtgaacgcgagcacacagccgacgatttgccctaatgcgctgtcgagaaactgactgaaatggaaagtcatcgggttatccagcacgataatatttatggtgctggccagtgcccccatcgagcccagtcgccgtttctgtacttctataccgaggaagaatcccagcactgccaggctaatgcacagcagcaacatgctctgttgggtattagggataatcaccaaaaagtagagcagccctaacggcagcgcggccagcgtcccgtagataaagtcgatcgccaccatgcgtggattcggcaaacgcattgccagtgacgtcactaccgcaatcatcaccattgcaccactgccggaagtccagcccgtccacagccagaaaagcgtgcccagaatgcaggaaagtgtggttcgccagaagttaaccattgcatgatgacgttcggctgactctacttttacttccggttcgccttgcaggatctcttcttcggtggcgttgatttttgtgttactgataacgccgcgcttgagaagctgataacgcgttgccgccgcgacccagctataaatggtgacaggcgtttcccgttccccggtccaggcgataactctccgcaggcgtttgagctgcttgtggacgtcctgcgcggtttctaccggcgtgtcaaaaaattcgcggaaagtatcagtgatcaattccgggcgcgtattctgaataagataagtttcgcaggattgggtaatcagcgtcagcgatagcgtattgatcgcttttaaacgtcgattggcccgcgcccagcgggaagattccatattcaggttgctgcgcatgccttgtagcgccgtggtgcgtcgcaccaggtcgccccaggctttatcgacaacttcaccatcgccatgcttgatacagagttgcattaattgatattgcgcgaccagcaaactttccagctctcgatccacttcttgtttgatcgatcgcggagaaaagagcaaatccgccataatcgcacacacaataccgataacgatctcgctacaacgttcgacggcaaactgcggcgtaagcaatggttccggctgaatggtgatcacaatgatcagcgcggtataaccggccagcccccacgcatacgagttttctattcgtaccagcgaggatatccaggtacaaaaaccggcccagatacagcacaccagaatcatcaataatggtgcgcggatcatcgcaatgatgatcaccagtccggcaatacagccaataaatgtgccgatgatgcgcaaaaagccacgatagcgaatagcgccagaatacggttcacctcccgcagcaaaggccgtaccggcggcaacaatcgccgctgtcagtaccgcccagcgtggcgtttccagctggaagtgaaagccaacaaacagcgccagtacaatggcggtcgccagttttaccgcaaagcgaatatgttggttagcaatggagaaaatacccatcgtgattaaccaaactcacgcaggcgatgggccattttacggaagaacgaatcctggctttcgtcgcgatcttgtttgccagtgaccaccactgtagcagtggtgcccgcaggccagatgttctcttgctggttgtcgagacgaatacgaaccggaacacgttgcgcaagacgcacccattcaaggttagagtctatagtcgccatccctttgtcgtcacgcgtgctgctggcgttggtgacccctgcggcaacactatcaacagtccctttcagcactttgttactgccaagcggcgtgatctctgcacgataccccggacgcaccccttccagcttagtttcttccatataggccagtacatagaaggagttctgtttcaccagcgcaaccgccgttgatcctcgagtaataaactcaccggtatagacgttgaggttggtcacccagccatctgctggcgcgcggatcaccgtgcgttcaagatccagttttgccagatcgcgggtcgcctgcgctttcgctaactgatgcagaaccgtttgtagtacgttgttggcctggtcgatctcttcgcgagacatcgcctgcacaccgagacggttacgacgtccggcctcctggcgtttctcctgtgccagtacctgataataagcaacatcggcttgcgcttcctcaagcgccttttgatagcgcggctggtcgatggtgaacagtatctgtccttttttcaccagctggttatcatgaacattcacctgggtaatgagtccagaaacgtccggcgcgatcgcaacgacgtcagcgctaaagcgcgcgtcacgcgtccagggggattcggtgtaatagacccaggcattaaaaattgcgatgaaggccagaatgactaatacgaccgtgatggccgtacgggagaattttcttattagtgttttcacttcaacctcaaacgaacagtcgcgatatcaaataaaacaagcagcaatagagcgcggtgttgaacaacgccggatgccagacaaagtcgtagatacctgttggcacaagtacccggcgcaccagccagaaaatcgccagtgataaaagcaattcaaaaaatatcggtgggaaggacagcccaaacaccacgataacgggaaacagactcatgttgaccttggttgtaaagagagagcaggcgttattattttcagcatctgtcgccgcagagaagggcatggaaagccgggcgagagcaacattgctgtagattgatatttaatatattagcgtaactgttatgctgttatctatattatgtgatctaaatcacttttaagtcagagtgaataatggaacgactaaaacgcatgtcggtgtttgccaaagtagttgaatttggctcttttaccgccgccgccagacagctacagatgagcgtttcgtccatcagtcagacggtatcaaaactggaagatgagttgcaggtaaagctgttaaaccgtagcacacgcagcattggcctgaccgaagccggtagaatttactaccagggctgccgtcgtatgcttcatgaagtgcaggatgttcatgagcaactgtatgccttcaataacacccccatcgggacgctacgcattggctgttcttcaactatggcacaaaatgttctcgccgggctgacagccaaaatgctgaaagaatacccaggtttgagcgtcaatctggttaccggaattccagcccccgacctgattgccgacggtctggatgtggtgatccgcgtcggcgcgttgcaggattccagcctgttttcccgccgtctgggcgcgatgccaatggtggtgtgcgccgcgaaaagctatctcacacaatacggcataccggaaaaacccgccgatttgagtagtcattcatggcttgaatacagcgtgcggcccgacaatgaatttgaactgatcgcaccggaagggatctcgactcgcctgatcccacaaggaagatttgtgactaatgatccgatgacgctggtgcgctggctgacggcgggtgccgggatcgcctacgtgccgctgatgtgggtgatcaacgagatcaatcgtggggagctggagatcctgctgccgcgttaccagtcagatccacgcccggtttatgcgttatataccgaaaaagataagctgccgctgaaggtacaggtcgtgatcaactcgctgacggattattttgttgaggtcggtaaattgtttcaggagatgcacgggcgcgggaaagagaagtaattcatattgtactgttacgttgtacaaacctgtgccaacgggttcccctcaccctaaccctcaccccaaaggggcgaggggaccgttcgtgcacgtagaaagattaattatccttctgaaaatagtgaaattattacgcagtaccgccaacagtcaggttatcgactttcaacgttggctggcccacgccaaccggcaaactttgcccttctttaccgcagacacccacgccgttatccagtttcaggtcgttgccaaccatcgaaatctgctgcatggtttcgataccggaaccaatcaacgttgcgcctttcaccggcttcgttactttaccgttttcaatcagatatgcttctgaagtggagaaaacgaatttgccggaggtgatatccacctgaccgccaccaaagttcggtgcatagataccgtactcaacggattcaataatttcctgcggggtcgatttacccggcagcatataggtgttggtcatacgcggcatgggcagatgggcgtaggattcacggcgaccgttgccagtcggcgtcatccccatcaaacgcgcgttgagtttatcctgcatgtagcctttcagaatgccgttctcaatcagcacgttgtactggcctggcgtaccttcgtcatcaatcgccaccgaacctcggcgatcgaccatcgtgccatcatcaaccacggtacacagttctgaagccaccagctccccgacctgtccactaaatactgaagtgccacggcggttgaagtcgccttccagaccgtgaccaaccgcttcatgcaacagcacgcccggccaacctgcgccaagtactaccggcatggtgcccgctggtgcagcaacggcagaaagattgaccagcgccatacgcactgcttcttttgcccatgcatccgcacggacttcgccgtcgagatcggcaaggaagaattcataaccaaaacgaccgccgccgccactggcaccgcgttcgcgtttgccatcttcttcgacgagaacgctcacggaaagacgcaccagcggacggacatccgccgctagcgtgccgtcggtggccgcaaccaaaattaattcatagacaccactgaggctggcagtcacttcctgtacgcgcttgtccgcttcgcgggcaaccttatcgacgcgacgcaggatatccagcttctcttcacggctcatgctttgcagcggatctaccgaggtatacaacgggctatgctctaccgcgcccagcgtctgtactttaccatcaccactatcacggacgatggtgcgcgccgcttgcgcactctgttccagcgccagcaggctgatttggtcagcgtaagcaaatccggttttttcaccgctgattgcacgcacaccaacgccctgatcgatgttgtaagaaccatctttaataatgcggtcttctaaaacccaggattcgtgatagctcgactgaaaatagagatcgccataatcaaggcgacgttcggccagttgaccgaggatcgcgaacaagtcctgatgtttcaggccgttcgccgctagcaattgttcacttaccaggttaagactcatcgtttttgctactcgttagttactgcagtagaggattttttacggctgccggatgcggcgtgaacgccctatccagcctacggttatgttccggtttgtaggcctgataagacgcacagcgtcgcatcaggcaacggctgtcggatgccggcgtaaacgccttatccgacctacggttatgttccgtttgtaggcctgataagacgcacagcgtcgcatcaggcaacggctgccggatgcggcgtaaacgccttatccgacctacggttatgttccgtttgtaggcctgataagacgcacagcgtcgcatcaggcaacggctgccggatgcggcgtgaacgccctatccgacctacggttatgttctggctcgttggcctttggcaacgattatcctatgagattggggcaattacgcgccctcgtcaaatcattgcgctttttctttacgcggttggcgcaacacttcgttgatttgcggatcgtccagcggacccgaaatgtgatagcgcaaaatggagactttgctccacagcggccccagcactttactggcggcaaacactgccgcgccaacaatggggttaaccgcaaaagccgcagccacgcccaccgtcgcagaaatctctggtgcgacaaccgcttccatattcaggtcgcgacgtaccagatttaccgaccctttcatggcgatatccgcctccaggccatccaccagcgtgtcgtcggtgtgcataacgccgtctttaatccacgcggtgctgcgaatggagtcaaaatagaacccttcgccaaaagtgtctctgaaatcaaaacgcagcttacgcatcagggcatctacgctcaataagcgcagcaattgcccggcatgtccggtattgatttcggtaatttcgcctttacccagttgagtatgaatgatgccattcaacgtcgcttcatctggctgccagggtgctttgcgccagtgtaaatcgtaatccacattaaatgacgactggcgtatgggcgtcgtgacaccaaaaaattctgcggcggcatcaattttctgcccgcgcagttttcctttcagcgaggtacgttcattccccggattattaacccattcaccatcggcagtaagccgcgagaaaccagtatcaatcagtccattggtcagcgttaacgtatcgccagaaatggtgatatcactgtcaatgcgaccgaatttttgcccccagaaccagcactctgtgcatcgtatttgggcgtccggccagccacggaagttaatgcgctccgttgtcgggaaaggtgatgacggcgttgaatcaccacgagttttcgccacgctcgggttgtaataaagatatttgatattcgccagccacggcgcgttattacgcatcgctagcgtggcgttgatttcacgcccttgcgcttcaaccagggtgccatttgccgtcggttgcgaaacaatactcaggttattccattgctgatttcccagtgacaacataggcgtacgtaacgttatgtgttgtgggaaactcgctgcaccaccgacactctccgcagcgcctttctggaacagggccagccactcggcaccattcatcggcggcatattgagttcaacgccactttgttccggcaacggcgggagcgttttactgtctgccgcccaaatagcacgatcgagcgtcagcttttgaccgagcaaccagcggctattgaaatgattatccgcaccagcctgtccggttaattcaaagctgttgagattgccatcaaccttaacgtttaccgctagtggttcacccgcaggtttggctaacggtgaaggtaagtgactgctcacattctttagatcgccgttcagctctatgttataggtcgcaccagcatgataaggcagatcaatgcccactttaccatcccacgccacgctgccactcaatgcttcgttcaccgcttcaggcagaacgccggttttcgccggttgccagttaccgttgaggtttaccgctacctggtaggcttttgccccttctttggtggaaaaatccacgttcaacggctgattaaaccagcttgctgtcagtggttcactttgcagatcgctattgataaagctgaatttaccgctcaaatttttcagggtgctgtcgagtggtttgataaacagactgttattacgcagcgtcacttcacctttcgcggttaccagttcgccgttcagcgggatatcaagatgtaagcgagcattcacatcgccgtcgagctggagttcttgcagggtcgcacccagagaatctttcagcggtgtctcatcaaagtaagggccaacggctttacccggacctttaatgtcagcgtcaatcagcagtttttcttttgagtagtcagggatcactgcggtaagattactcgcgcgcacgccgcccagattaacgccatcggttttcatccataaaccgtcgttaataaagtccagttcaatatcaaggttagttaatgcaggccagtccggctggaaggcaaacttcgcgttgcgcagcggcaccagcacttcaaactgaccttcgttgtgtttataggggaagagttgcggattgccaccataaaccagcgtcgcgttatccgcttcaccgccctgaatcgcgccacttaagtaatcaaccaggtctttacccatcaagttttccgggaaatagcgccaggcttgtgaaccatcatcggtactgatgccagccagaatacccagccagggttcatcgttagcaggttgcaggtaacgaaaaccgccgcgcgcatggacggctttggctttaacgtcaatattacgcccatccagctggaaacctttgttattgttcagccagcttatagttgcctggccgtcggcgatttctagtggcgcacggaataccgtttcgtaaggcatctttgcctgcttcatcgacgcggtaagcaaaccattttcaacgctgccggaaagcgtcccggagaagtgttccgcacccggtaataatttccattgcttccaggccagatcgctccacgatgcctgaaaacgggtcttgtctgccgcctgaagcgggatatccagcgccagagtgttaatcttgccgctcggttgtgtggagcgccaaacatcacccagtgcaggtgaaagtttcgcggccagcgggcgtatgccctccaggcctgccagctccagattactggcgcgaatccggagttcgtcactgcgtttattgtctttgccgccaacgtcctgttccggtatccaggccagcgtcaatgctccgctcggccagggtttgccgtccatcgtgatccgtgtatcgggaatagagaactgccagcccggattttcacgcgtaatatgcgcggtcagattatccaccgacagcgtatgcgtttgcttctcgcccaaccagctggcaccgccctgttttcagccagacgtcaccgccggttacatcgcctttgtcgatcgtcatccagccttcaagggagaactgtgccgtttccagcgcaatattgtcctgcatccatttaccgagccacggcttcaggtcgatgtcatccgcctggagccagacgcgaccattgcttaacaacccctcatcatcgcgcaaatccatgcgcacctgcatcacgccgtgctgtccggtaaggctggagaggcttaccaggccttccgcacggtgtcgacgtggatcgttcagccaggtgagttgtgggatcgccagctcggcgcgctgaccggatggcgtcaggaaactgacttcactgtcgcgaagatcgaaatggtcaaattgacgaagaaacagatcgctgatgtgactggcttccagactgtcatcactaccaccgctggtgataggagtgttggtgcgaaagcgcagctgccagaaagtgaggtcgcgaaactgccagcgcatatgtaacaggctctgccagacatccagcgccagagtaacgcgtttaaccgaaaattcgccgccatcttttagttctgcacggatgtcgtgtgcttcaagcgtcgggccaaaattctgccagctggctgagagctgactggcttctaccggcatgccagtcgcggattctattttgttgaggatttccggacgccaggcgtcaagatgcggtaaagcaatacgcaggccgctaaccagcagggcagcgatcacaacgagcgcggctccagtaagcagtaaaatccccggcaatcgcctcacccgtcactccttgtctgctaaaaatgtgactcaaaaaccctttgccggatggcggcccagcatctgtttacatcattacgacgtcaaactgctcctggttatagagcggttcaatttgtactttaacctgtttgccaacgaaaatttccacttccgccagcgagtgtgactcttcgcctttcaaggcttcagctactgccggagaagcatagaccaggaaacggtcggagtcgtaagcatggtggacacgaacaatctcgcgcatgatttcatagcataccgtttccacggttttcaccgttccgcgaccgtggcaggttgggcattcgttacacagtacgtgctcaatgctttcgcgggtgcgtttacgcgtcatctccaccagccccagcgccgaaaaaccattaacgctggttttcacccggtctttgctcaacgcctgctccagcgagtgcagcactcggcggcggtgatcttcattattcatatcgatgaaatcaataatgataatcccgcccagattacgcaaccgtaactggcgagcgatagcctgcgtcgcttcaatattggtattgaaaatggtgtcgtccagattgcgatgaccgacaaacgctccggtattgatgtccacggtggtcatcgcttcggtctggtcgataatgagataaccaccggatttcagttctactttgcgttccagcgctcgctggatttcgttttcgacatcaaagagatcgaaaatcggctggcgtcctgtgtaatgctccagcttgcttgtcatctcgggaatgtactccgaggtgaactcaagtaacgcttcgtaagtcaggcgtgagtcaacgcgaatgcggtccagttcggcatcggcgaaatcacgcagaacacgctgcgccagcgccagttcgccgtacagctgataacgggtctgcgggcgttttttacgctccataactttggtccagacgcgtttcagataagcggcatcggaggccagttcagcctcgccaaccccttccgctgcggtacggatgataaacccgccctgctcgtcgcaatactctgcgaccacttttttcaggcgttcacgttctgattcgctttcaatacgttgggaaaccccaacgtgagaagcccctggcataaacaccagatagcgagaagggagcgtgatatcggtggtcaggcgcgcacctttagtgccaagcggatctttcaccacctgcaccatcagatcttgcccctgacgaaccagttccgagatgtcgcgcaccgtgaattgcttttgttcttcacccgccacacattcggtgtgcggcatgatgtcggatgcatgaagaaacgcggctttatccagcccaatatctacaaaagccgcctgcatacccggaagtacacgacttacacgacccttgtagatattgcctactattccgcgtcgcgcctcacgttcaatatgaatttcctgcagaataccgccatcaatatacgccactcgcgtttccgaaggcgttacgtttactaacaattcagccgtcatgtttatcccttttctcacgcagtgcgttaaaattacttaataattcatacgtttcaaccagcggtaagccgactacggcgtgatagctgccatttatcttcctgacaaaacagccacccagcccctgaataccgtatgcacctgctttatctaacggttcatcgctggcgacatagcccgcgatgtcttcgtctgttaacgttctgaaagtcacatcggtgaccaccaggcaatcgagaatgtgctggctgtcggccaacgccactgctgtcatcacctgatgggtctgacccgataatttgcgcaacatctgcgccgcatgctctgcgtcgcgcggtttctccagcacttctccgttcaggataacgatagtatccgcacccagcaccgggagatccttcgccgtttgcgcgacacctgcccgtgctttctcgcgcgccagacgcacaacatactgctgcgcgctctcctgcggctgacgctgctcctcaatgcccgtaacaatacgttcaaaggtcacgccaagttgcgcaagtaactcctgacgacgcggagaaccggaagctaaatacagagaagtcatagaaacctttattgcactgcaaactgctgacggactttgcgcatcagcaagaaaatccacggccagagcaccccattgactacactactccagaacacttccggtctgaaagagacgttaatcactaaaaactctgcccagaaaacaataatatccaccaccagcgaaagcaacatgacgaccagcgcctgctgccataatgcgaggttgcggaaaagctggtatttcagcgccaccaggtaagcaatgatgctcatcgccaatacgcgtacgccaagcgtcgagccgctgatcagatccagtatggcacccatcacaaaacctgtgcccacatttacgcgatgaggcaaggccaggatccaatacaacaagatgagtaacacccagtttggccggaaaacaatcaggttatccggccagggcatgatttgcagcaacagcgcaatgaggaaagagagccagattacccagcgtccctggctacgatagctcgccactattgccctcccggcgcacgcgcaggcggttgagcaccactttgcggcggcgtagccctttgtggagagcgattagcagcaggctgtgtcggcgcagcaggcgcagtagctgcatttcctgtcgccggttgctgcggagtcggctgagcgatccccgttgccggttcaggtaactttggccccatcgcgtctggcgaaggcaatacctgcggcatcatctgcatcagacgttcattagcaacacgatgcacctcttccggcgtcatcgggttagcgccgttacgatctgccccccacagcagcagcagataacgcaaacgttgcagccctgcagtcggacgcgcctgaatcacagtataagcgcgctgggtatcgagttttacggaagagacaaccgcgaccggatagccttccgggaaacgaccgcccagaccggaagtcaccagcacatcaccaacacgaatatccgtattcgccggcagatgctcaagctgcaaatcatccgtacaaccgttaccggctgcaattacgcggatatcgttgcgcagcacctggattggcagcgcgtgggtcgcatcacaaatcagcagcacgcgactggtcagtttagcgacggccaccacctgaccaacaacacctttgtcgctgatgaccggctggccttcataaacgccattaacgctacctttatcgataacaacttgatcgctataaggatcgttaaccgtggagataacctgagtcaccattttctgctcatcctgacgcagcggggaacccagcagctcgcgcagacgcgcgttctcctgtttgtattgtccaagcatcagcagttcactgtttttcagcaacagttcctgacgtaacgcccggttttcaagttctaattggtcacgcgaggccagcgtctgcgatacgccatccagcaattcacgaggagcattggaaacaaagtagaaaggactgacggcggtatccatataagtacggatttgactgaacgtccccaggcggctgtcggcaataataatgccgagcgccaccagcaccgccagaataaggcgaatctgtagcgacgggccacggctaaaaattggcttcataagttatgcgtattctcgtatcagaccaggcagggtaaacagacacttcccctgcctgcatccgattactcttcgctgaacaggtcgccgccgtgcatgtcgatcatttccagcgctttgccgccaccgcgcgccacacaggtcagcgggtcttcagcaacaacgactggaatgccggtttcttccattaacaaacggtcaaggttacgcagcagtgcgccaccaccggtgagcaccatgccgcgctcggagatgtcggaagccagttccggcgggcactgttccagtgcaaccattaccgcgctcacaataccggtcagcggttcctgcagtgcttcgaggatttcattggagttcagggtaaaaccgcgtggaacaccttctgccaggttacggccacgaacttcgatttcacggacttcatcgcccggataagccgaaccgatttcgtgcttgatacgttctgcggtggcttcaccgatcagagaaccgtaattacgacgcacatagttgatgatagcttcgtcgaaacggtcaccaccaatgcgcacagaagaggagtaaaccacaccgttcaaggagataacagcaacttcagtggtaccaccaccgatatcaaccaccatagaaccggtcgcttcagaaaccggcaggccagcaccaattgcggcagccatcggttcttcaatcaggaagacttcacgggcaccagcgccctgcgcggattcacgaattgcgcggcgttcaacctgggtcgcgccaaccggcacacaaaccagaacgcgcgggcttggacgcataaagctgttgctgtgcacttgtttgatgaagtgctggagcattttttcagtcacgaagaagtcggcgataacgccgtctttcattgggcgaatggcagcaatattgcccggcgtacggcccagcatctgcttcgcgtcatgacctactgcagctacgcttttcggtgaaccggcacgatcctgacgaatggccaccacggaaggctcattcaatacgatgccttgtccttttacataaatgagggtattcgcagtacccaggtcaatggacaagtcattggaaaacatgccacgaaattttttcaacatactaagggataatcctgaaagctggggcggaaaagaaaatccgcttactttaccaaccacacgcagcagcgacaaggcgcaaaaatcatctgctacggtgaaaattagtgcagttcgtttcctttgttacaaatctctgcctgagtccagaaaggcttaatgcatcagcagcattcctcgcctgtttgcaaccgcgtaaggtcattcatctgcatatgtgctgcaacaatctggcgagcagacaagcacactcccatgagacgcagcgcgcattattctacgtgaaaacggattaaacggcaggttaaaccgagtatctttgtgaatattttttcacgttagtatcaagtggctgtgaggacgcgaaaaaatccccttgcccgcctgtaacaccgcgctgaatcagggtctgccactcgcttcgcgaacgcacgccggtggcgtaaacctgggtgctggtcccggagcaggcttccaccaggctttgaaccagcagctggttctccgttcgcttctcaatgtttctgaccagccccggatggagcttgagtaactcaacattaagttctttgatccaactggtacttaccagcgtcaaaccagcctggttgacggctacccgtacccctaaagcattcactaaacgaataacaggttgtaaacgactgatatgttgacctacatcggcctctgcaagttcaataattatgcgttttcgttgtgatttttcacattgcattaacgtatcgcgcagccaacgctgaaaacgcgggcgaatcagcgactcaacggtaacctgaatcgccagattttcctctggccagtaacgcaatagtggaataagacggctgatttgcagacggtcatactcttccgataagccaaactgcaagaccatcggcatatactccgccgagctaacctcttcattaccatcgaagatgcggcacatgagttcgcgatgatgaacctgaccttcgcgagtaaccgccggtttttgataaaggcgcgggccgccgcgactgagcatttgctcgataagcgtacgccagcgaacattaccgcgtcctttttcaggcaacgagtcatcgtaaatagcccagctattgccgccctgcaatcccgcattacgcgtggcagactctgcatgttccattacctgctcggtatcctgaccactacgccaggcgcagataccaatgtggatcatatcgtcgcgatcgagcattttattgttcggcaaggtatcaacggctttgattaactgaccggcgatgctctctgcctcttttaacgtccggtgcggtaacagcgcagcaaaatcactgcggtggtaacgcgccagcagtgcgccagggtagcgcatcataaatgtcgacagcagattcgtcagagtgaagaactgttcttcaacctggctgtgcccccaggtatcgctcaacatattgaaatccggcagacgaatcatcatcacgatcccgtgggtacctactttctcctgatcttccagtaacgttgctaactgattatcgaaaaagagtcggttattgaggccggttttcacgtcctgggcggcataagagcggatcagcgtatcaagacggctgtgttgttcgcgtgcgttctgaatttcacgaagcagcgtatccagcgcactgctggttctgggcggccattcatagatggttcccaacacattagagccacgctcaccgtttaagatacgagtagcccgggtttccagcaattcttgcccggcaagttgccgttgtaaccagcgtaccgccaggaagagcataacaatgataaagccaatcgcccccgtgagcggcgcggtggtcatcaacgaatggaaatagttgcccatcggatcctgataaaccagacgcaacgacatccccggatgctttatcaacggaacgctcagttcgcgaaacagatcgctggagccaactggacgataactaccatttctggccagggtataaacctgtttatcaccatggagcaggtctacacgaacgatatctgccgacatcattaattcggtaatttgtggccttaatacgctgaagtcattcgacacaaggtgggtatcaatcgccgtcgccaccgcctgaacgcgatgactaaacttatactgaatggcgttgtagaaacttagcgaacagcccagcaaagtcacaaaaattgttaacccggtgagcagcgtaacaaaggccgaaaatttcgtcgttaatctcatccttgtgttaactccgatagtgaggaagcgggcatactagcaaatcagatttatctcgcaatttattgcgcttcatcggctttgcttttccattagcgagtatagtcttcagaaattattttccaatccatcatgcacatgaggaccacttatgcaggcgttacttttagaacagcaggacggcaaaactctcgcatcagtacagactctggacgaaagtcgcctgccggagggcgatgtcacggtcgatgttcactggtcgagcctgaactataaagatgcgctggcgattaccggtaagggaaaaatcatccgtaattttccgatgattcctgggatcgattttgccggaactgtacgcaccagcgaagatccgcgttttcatgccggtcaggaggtgttactcactggctggggcgttggtgaaaaccactggggtgggctggcggagcaggcgcgagtgaaaggtgactggctggttgccatgccgcaagggctggacgcgcgtaaagcaatgattatcggtactgccggttttaccgccatgctgtgtgtgatggcgctggaagatgccggtgttcgcccgcaggacggggagattgtcgtgacgggtgccagtggtggcgtcggcagtaccgccgtggcgctgctgcataagttgggttatcaggtcgttgccgtttccggtcgcgaaagtacccatgaatatctgaaaagtttaggtgctagccgtgttctccctcgtgatgagtttgccgaatcccgtcctctggaaaaacaagtctgggctggggcaattgacaccgttggcgacaaagtgctggcaaaagtgctggcgcaaatgaattacggcggctgcgtggcggcctgtggtctggcgggtggttttactctgccaaccacggtcatgccatttattctgcgtaatgtccgtttgcaaggggtggattcagtaatgacgccaccagaacgccgcgcacaagcctggcagcgactggtcgccgatttaccggaatcattctatacccaggcggcaaaagagatatctctgtcagaggcaccgaactttgccgaggccatcattaataaccagatccagggtcgcacgctggtgaaggttaactaaccatttagcagggaataataagagagggaactcattttgaaatcattattcaatcggttaacgggaaaagcggttagccggacagctttcgtcgaacaccttggtcaggaagttatacaacatcatccaaactggaaagtcatgatttcgactgaccacaaattgatgcgcattgatactccactaaacagctattattgatacgcctccgtcgcctgttaggtttatgttgctttgcctgggcgacgctacgcttagccccttacttatttctggtaccatggggtgaataatctgattttgtttgactacaaattaatcactcgaacctatttaatgctgagcattgtcaatcggttaattttgcgtgctttagcattcacatctatccagacgatgcagtgaaaattgggtaatccccagcaaccgctgcgtaatgtcgtctatcttgtcgcgatcctggcatccctacattatttgtggtctgtgaagattatctcattgcagcccctcatcttcgcagggctggcttttcagcttttcaccttacgttataagaagttccgtcgatgatggcgctaatttcgtgaattgtgcggcttgttgcaaattacacggtgttgaaggttatttacatgttagctgttgattatcttccctgataagaccagtatttagctgccaattgctacgaaatcgttataatgtgcgacctcgtcctccctgacgcagtttttgcgctgcggaaaaggtgacattggcgcaacgaaggtatattttgttttttgccggaggatagcagcagatcgctgcacaatgtccgtcaagtctaacattgacactctggggcaaaatagaccggcgtcccggcctgctggaatttatcgctatgcatacagctgtcggggcatacgctttacagacggcggtgaaacgcctgtcacaatcacactaaacaaagagtacggaacccactcatggatattcgtaagattaaaaaactgatcgagctggttgaagaatcaggcatctccgaactggaaatttctgaaggcgaagagtcagtacgcattagccgtgcagctcctgccgcaagtttccctgtgatgcaacaagcttacgctgcaccaatgatgcagcagccagctcaatctaacgcagccgctccggcgaccgttccttccatggaagcgccagcagcagcggaaatcagtggtcacatcgtacgttccccgatggttggtactttctaccgcaccccaagcccggacgcaaaagcgttcatcgaagtgggtcagaaagtcaacgtgggcgataccctgtgcatcgttgaagccatgaaaatgatgaaccagatcgaagcggacaaatccggtaccgtgaaagcaattctggtcgaaagtggacaaccggtagaatttgacgagccgctggtcgtcatcgagtaacgaggcgaacatgctggataaaattgttattgccaaccgcggcgagattgcattgcgtattcttcgtgcctgtaaagaactgggcatcaagactgtcgctgtgcactccagcgcggatcgcgatctaaaacacgtattactggcagatgaaacggtctgtattggccctgctccgtcagtaaaaagttatctgaacatcccggcaatcatcagcgccgctgaaatcaccggcgcagtagcaatccatccgggttacggcttcctctccgagaacgccaactttgccgagcaggttgaacgctccggctttatcttcattggcccgaaagcagaaaccattcgcctgatgggcgacaaagtatccgcaatcgcggcgatgaaaaaagcgggcgtcccttgcgtaccgggttctgacggcccgctgggcgacgatatggataaaaaccgtgccattgctaaacgcattggttatccggtgattatcaaagcctccggcggcggcggcggtcgcggtatgcgcgtagtgcgcggcgacgctgaactggcacaatccatctccatgacccgtgcggaagcgaaagctgctttcagcaacgatatggtttacatggagaaatacctggaaaatcctcgccacgtcgagattcaggtactggctgacggtcagggcaacgctatctatctggcggaacgtgactgctccatgcaacgccgccaccagaaagtggtcgaagaagcgccagcaccgggcattaccccggaactgcgtcgctacatcggcgaacgttgcgctaaagcgtgtgttgatatcggctatcgcggtgcaggtactttcgagttcctgttcgaaaacggcgagttctatttcatcgaaatgaacacccgtattcaggtagaacacccggttacagaaatgatcaccggcgttgacctgatcaaagaacagctgcgtatcgctgccggtcaaccgctgtcgatcaagcaagaagaagttcacgttcgcggccatgcggtggaatgtcgtatcaacgccgaagatccgaacaccttcctgccaagtccgggcaaaatcacccgtttccacgcacctggcggttttggcgtacgttgggagtctcatatctacgcgggctacaccgtaccgccgtactatgactcaatgatcggtaagctgatttgctacggtgaaaaccgtgacgtggcgattgcccgcatgaagaatgcgctgcaggagctgatcatcgacggtatcaaaaccaacgttgatctgcagatccgcatcatgaatgacgagaacttccagcatggtggcactaacatccactatctggagaaaaaactcggtcttcaggaaaaataagactgctaaagcgtcaaaaggccggattttccggccttttttattactggggatcgacaacccccataaggtacaatccccgctttcttcacccatcagggacaaaaaatggacactcgttttgttcaggcccataaagaggcgcgctgggcgctggggctgacccttttgtatctggcagtttggttagtagccgcttacttatctggcgttgcccccggttttaccggctttccgcgctggtttgagatggcctgcatcctgacgccgctgctgtttattggactgtgctgggcgatggtgaaatttatctatcgcgatatcccactggaggatgacgatgcagcttgaagtaattctaccgctggtcgcctatctggtggtggtgttcggtatctcggtttatgcgatgcgtaaacggagcaccggcaccttccttaatgagtatttcctcggcagccgctctatgggcggtattgtgctggcgatgacgctcaccgcgacctatatcagtgccagttcgtttatcggcgggccaggagctgcttataaatacgggctgggctgggtattgctggcgatgattcagcttcctgcagtctggctttcactcggtattctcggcaagaagtttgcgattcttgcgcgccgctacaatgcagtgacgctgaacgatatgctgtttgcccgctaccagagtcgtcttctggtgtggctggcgagtttgagtttgctggttgcgttcgttggtgcgatgaccgtgcagtttatcggcggtgcgcgcctgctggaaaccgcggcgggtattccttatgaaaccgggctgctgatttttggtatcagcattgcgttatataccgcctttggtggctttcgcgccagcgtgctgaacgacaccatgcaagggcttgtgatgctgattggcaccgttgtgctgcttattggcgtagtacatgccgctggcggcttaagtaacgcagtacagaccttgcaaaccatcgatccgcaactggttacgccacaaggcgctgacgatattctgtcgcctgcctttatgacgtcgttctgggtactggtgtgttttggcgtgattggcctgccgcatactgcggtgcgctgtatctcttataaagacagcaaagccgtacatcgggggatcatcatcggtacgattgtggtcgcaattctgatgttcggtatgcacctggccggagcgttaggtcgggcggtgatccccgatctcaccgtaccggacctggtgatcccaacgttaatggtaaaagtgctgccaccgtttgctgccgggatcttcctggctgcaccgatggctgcgatcatgtcgacaattaacgcccaactgctgcaaagttccgctacgatcattaaagatctctatctgaatatccgtccggatcaaatgcaaaacgagacgcgtctgaagcggatgtcggcggtaattacgttagttctcggcgcgttgctgctgcttgccgcctggaagccgccagaaatgatcatctggctgaatttgttggccttcggtgggctggaagccgttttcctgtggccgctggtgctgggtctttactgggaacgcgccaacgccaaaggcgcgctaagtgcgatgatcgttggcggcgtgctgtatgccgtactcgcgacgctgaatattcagtacctgggcttccaccctatcgtgccctcgttactactaagtttgctggctttcctggtcggaaaccgtttcggtacatccgtcccgcaagctaccgttttgactactgataaataaagagttttgccatgccttggatccaactgaaactgaacaccaccggcgcgaacgcggaagatcttagcgatgcgctgatggaagcgggtgccgtttctatcacttttcaggatacccacgatacgccagtatttgaaccgctgccgggcgaaacgcgcctgtggggcgacaccgatgtgattggtctgttcgacgctgaaaccgatatgaacgacgtggtggcgattctggaaaaccatccgctgctcggcgcaggcttcgcgcataaaatcgaacaactagaagataaagactgggagcgcgaatggatggataatttccacccgatgcgctttggtgaacgactgtggatctgccctagctggcgtgatgtgccggacgaaaacgccgtcaacgtgatgttagatccagggctggcgtttggtacgggtacccatccaaccacctctctgtgcctgcaatggctcgacagcctcgatttaaccggtaaaacagtcatcgactttggctgtggttccggcattctggcgatcgcggcgctgaaactgggtgcagcaaaagccattggtattgatatcgatccgcaggcgattcaggccagccgcgataacgccgaacgtaatggcgtttctgaccgtctggaactctacttaccgaaagatcagccagaagaaatgaaagccgacgtggtggtcgctaacatccttgcaggcccattacgtgaactggcaccgttaatcagcgtcctgccggtttcaggcggtttgctgggcctttccggtattctggcaagccaggcagagagcgtttgtgaagcttatgccgatagcttcgcactggacccggtcgtggaaaaagaagagtggtgccgtattaccggtcgtaagaattaaccttcgcatcgccgtagggtgacgcggggcgaagtgcgagcaagctcacaaaaggcacgtaaatttgccgattatttacgcaaatttgcgtgccaaaattttcattcataaagaaaaattgagaacttactcaaatttctttgagtgtaaattttagtcactattttctaatatgatgatttttatgagtaattatcgcaccacgctcattttaaatgcaattctttgatccatctcagaggattggtcaaagtttggcctttcatctcgtgcaaaaaatgcgtaatatacgccgccttgcagtcacagtatggtcatttcttaactcatgcgcatcggacaatatcagctcagaaatcgcctgatcgcagcgcccatggctggcattacagacagaccttttcggacgttgtgctacgagatgggagccggattgacagtatccgagatgatgtcttctaacccacaggtttgggaaagcgacaaatctcgtttacggatggtgcacattgatgaacccggtattcgcaccgtgcaaattgctggtagcgatccgaaagaaatggcagatgcagcacgtattaacgtggaaagcggtgcccagattattgatatcaatatgggttgcccggctaaaaaagtgaatcgcaagctcgcaggttcagccctcttgcagtacccggatgtcgttaaatcgatccttaccgaggtcgtcaatgcagtggacgttcctgttaccctgaagattcgcaccggctgggcaccggaacaccgtaactgcgaagagattgcccaactggctgaagactgtggcattcaggctctgaccattcatggccgtacacgcgcctgtttgttcaatggagaagctgagtacgacagtattcgggcagttaagcagaaagtttccattccggttatcgcgaatggcgacattactgacccgcttaaagccagagctgtgctcgactatacaggggcggatgccctgatgataggccgcgcagctcagggaagaccctggatctttcgggaaatccagcattatctggacactggggagttgctgcccccgctgcctttggcagaggttaagcgcttgctttgcgcgcacgttcgggaactgcatgacttttatggtccggcaaaagggtaccgaattgcacgtaaacacgtttcctggtatctccaggaacacgctccaaatgaccagtttcggcgcacattcaacgccattgaggatgccagcgaacagctggaggcgttggaggcatacttcgaaaattttgcgtaaacagaaataaagagctgacagaactatgttcgaacaacgcgtaaattctgacgtactgaccgtttctaccgttaactctcaggatcaggtaacccaaaaacccctgcgtgactcggttaaacaggcactgaagaactattttgctcaactgaatggtcaggatgtgaatgacctctatgagctggtactggctgaagtagaacagcccctgttggacatggtgatgcaatacacccgtggtaaccagacccgtgctgcgctgatgatgggcatcaaccgtggtacgctgcgtaaaaaattgaaaaaatacggcatgaactaattcaggttagctaaatgcttgattaaaaaggcgctactcggcatggggaagcgccttttttataggtgtcacaaagggagtgaccatgagaacaggatgtgaaccgacccggtttggtaatgaagctaagaccattattcacggtgatgcgcttgccgaacttaaaaagatccccgccgaaagtgtcgatctgatctttgccgacccaccatataacatcggtaaaaattttgatggtctgatcgaagcctggaaagaagatctgtttatcgactggctgtttgaagtgattgcagagtgccaccgcgttctgaaaaagcagggcagcatgtacatcatgaacagtacggaaaacatgccctttatcgatctccagtgccgcaagctttttaccatcaaaagtcgcatcgtctggtcatatgacagttctggagtgcaggcgaaaaaacactacggctccatgtacgaacccatcctgatgatggtgaaagacgcaaagaactacacattcaacggtgatgctattctggtagaagccaaaaccggatcgcagcgcgcgttgatcgattatcgcaaaaatcctccacagccttacaatcatcaaaaagtaccgggtaacgtttgggattttccgcgcgtgcgttatttgatggatgaatatgaaaaccacccgacgcaaaaaccggaagccttactgaaacgcattattctcgcctcttccaacccaggcgatatcgttctcgacccgtttgctggtagctttactaccggtgccgtagccatcgccagcggacgaaaattcattggtattgagatcaacagcgagtacatcaaaatggggcttcgacggctggatgtcgcgtcgcattactctgcggaagaactggcgaaagtgaaaaaaagaaagaccggcaacctgtcaaaacgaagccggttaagcgaagttgaccccgatctcattacaaagtaaaggatgtgtaagcctggttttcagattattcatttcgtgtatatttcctgccagacttggttaaacatgcacaggctcaggtaatgattcgcaagtattggtggctcgtcgttttcgctgtcttcgtttttctgtttgatactttactgatgcagtggattgaactgctggcaacagaaacagacaaatgccgcaatatgaactcagttaatccactaaaactggttaactgtgacgaactgaattttcaggacagaatgtgaatttacatgacacttaattcattcgtttgatgaattaatttcgttatgttttcatctggcatgaacattcttaatacgttatcgaccagagcgggggcttgtttataaagatcataacccgccatattcattaaccagttttgaacaattccgctgaaggcaccatcaataataatcatcacaacatctaaatcgaggttatttgctacacaaccttgttgctgacacgcctgcaatacttcgcggagagtctgcggattaaagcccatcttttcgcgtatcactccctcggccagcatctcatcattaaattcacatttgtgatataagattttcagcaacgcctgctggcggggaattttggcaatatattgcaagccgacaatcaatttttcacgcaattgttgaaacgggtcatgctctaatccagccgtcaagtgttcctggattaactcccgcaatgaaggctgttgcaaccacatctcattaaacagttgagtcttgttttcgaagtgccagtagatagcgccacgcgtaacgttagcggcgtcggcaatgtcgttgagcgtcgtcttgcttacgccatgctgcgcaaactgggcgatggcagtttcaatcagttcttgccgggtcttcagagcttcggctttggttctttttgccatgattaattattcaggaaataaatatattcgacacagagtgagaaaatagcgaaggttaatctatcacctaatgtgtatttatacgagaggctaatattgagttgctataaatcgttaaataaataatatatattatttacctaagatacattcactacatcaatatatatttcaatttacgaggttttaattctgcctctttcaacccgcgtcaaaataaaacagtagaatattaatctttttttgtgtttatgtgccttgagatgcctgtattcataactattccttacatcgacgaatgataatttgtaggatagcgaactgtatttttctttctgcgagttaacgcgttgcctttttgggtaaataacgcgcttttggttttttgaggaatagtaatgacgaaacatgccaggtttttcctcctgccctcctttattctgatctccgcggctttaatcgccggttgtaacgataagggagaagagaaagctcacgtcggtgaaccgcaggttaccgttcatattgtaaaaacggccccgttagaagttaagactgaattaccaggccgcaccaatgcttatcgtatagccgaagttcgcccacaggttagcgggatcgtactgaatcgcaatttcactgaaggcagcgatgtgcaagcaggccagtccctgtaccagatcgatcccgcgacctatcaggcaaattatgacagcgcgaaaggcgaactggcgaaaagtgaagccgccgccgccatcgcgcatttgacggtaaaacgttacgttccgctcgtgggtacgaaatacatcagccagcaggagtacgaccaggccattgctgatgctcgtcaggccgatgccgccgtgattgccgcaaaagccacagtcgaaagcgctcgcatcaatcttgcttataccaaagtcactgcgccaattagcggacgtatcggcaaatcgactgtgaccgaaggcgctcttgtcactaatgggcaaacgactgaactggcgactgtccagcagctcgatcctatctacgttgatgtgacccaatccagcaacgattttatgaggctgaagcaatccgtagagcaaggaaatttgcataaggaaaacgccaccagcaacgtagagttggtcatggaaaacggtcaaacctatcccctgaaaggtacgctgcaattctccgatgtgaccgttgatgaaagcaccggctccataaccctacgtgctgtcttccctaacccgcaacatacgcttttgccgggtatgtttgtgcgtgcacggattgatgaaggcgtccaacctgacgccattcttatcccgcaacaaggcgttagccgcacaccgcgtggtgatgcaaccgtgctgattgttaacgataaaagtcaggttgaagcgcgccctgtcgttgccagtcaggcgattggcgataaatggttgattagtgaaggactgaaatctggcgatcaagtcattgtcagcggcctgcaaaaagcgcgtccgggagagcaggttaaagccactaccgatacccccgcagatactgcatcgaagtaaggtaatctgacatggcaaacttttttattcgacgaccgatatttgcatgggtgctggccattattctgatgatggcgggcgcactggcgatcctacaattgcccgtcgctcagtatccaacaattgcaccgcctgcggtttctgtttcagcaaactatccgggcgctgatgcgcagaccgtgcaggatacggtgacgcaggttatcgaacagaatatgaacggtatcgataacctgatgtatatgtcctccaccagcgattccgccggtagcgtgacaattacccttaccttccagtccgggaccgatcctgatatcgcgcaagtgcaggtgcagaacaaactccagctcgccacgccgttgctgccgcaggaggttcagcagcaggggatcagtgttgaaaagtccagtagcagctatttgatggtggcgggctttgtctctgataacccaggcaccacacaggacgatatctcggactatgtggcctctaacgttaaagatacgcttagccgtctgaatggcgtcggtgacgtacagcttttcggcgcacagtatgcgatgcgtatctggctggatgccgatctgctaaacaaatataaactgacaccggttgatgtgattaaccagttgaaggtacagaacgatcagatcgctgccggacagttgggcggaacgccagcgttaccagggcaacaattgaacgcctcgattattgctcagacgcggtttaaaaatccggaagaattcggcaaagtgaccctgcgcgtaaacagtgacggctcggtggtacgcctgaaagatgtcgcacgggttgaacttggcggtgaaaactataacgttatcgctcgtatcaacggaaaaccggcggcgggcctggggattaagctggcaaccggcgcgaatgctctcgataccgcgaaagccattaaggcaaaactggcggaattacagccattcttcccgcagggaatgaaggttctctacccttatgacaccacgccattcgtccagctttctattcacgaagtggtaaaaacgctgttcgaagccattatgctggtgttcctggtgatgtatctgttcttgcagaatatgcgagcaacgctgatccccaccattgcggtacccgtggtgttgttagggacgtttgccatcctcgccgcttttggttactccatcaacacactaacgatgttcgggatggtgcttgccatcgggctgctcgtcgatgatgcgatagtggtggtggagaacgtcgagcgcgtgatgatggaggataagctcccgccaaaagaagcgacggaaaaatcgatgtcgcaaattcagggcgcactggtgggtatcgcgatggtgctgtcagcggtatttattccgatggcattcttcggcggttctactggggcaatttatcgccagttctctatcaccatcgtttcggcaatggcgctttctgttctggtggcattgattcttacccctgcgttatgtgcaacgctgcttaaacccgtctctgctgagcatcacgaaaataagggcggtttcttcggttggtttaataccaccttcgatcatagcgttaaccactacaccaacagcgtcggcaaaatcctcggatccacaggacgatatttactgatctatgcgctgattgttgcaggaatggtggtgttgtttttacgtcttccgtcttccttcttacctgaagaggatcagggtgtctttctgaccatgattcagttacccgctggcgcgacgcaagagcggacgcaaaaagtgttggatcaagttacggattactatctgaagaacgagaaagcgaacgttgaaagtgtctttacggttaacggctttagcttcagcggccaggcacaaaacgccggtatggccttcgtcagtctgaaaccgtgggaagagcgtaatggtgacgaaaacagtgcggaagcggtaatccatcgtgccaaaatggaattgggcaagatccgcgacggttttgtcattccattcaatatgccagccattgttgaactgggcacggcaacgggtttcgactttgagttaattgatcaggctgggctgggtcacgatgccctaacccaggcccgtaaccagttgcttggtatggcggcgcaacatcctgccagcttagtcagcgtgcgccctaatggcctggaagacaccgcgcagtttaaactggaagttgaccaggaaaaggcgcaggcattaggtgtttcactttctgacatcaatcagaccatttcaacggcgctgggtgggacttacgttaacgacttcatcgaccgtggccgcgtgaaaaagttgtatgttcaggcggatgccaaattccgtatgctgccagaagatgtcgataaactttatgtccgcagcgccaacggcgaaatggtgccattctcggcctttaccacttcacattgggtgtatggctctccgcgactggaacgctacaacggtctgccgtcaatggagattcagggggaagccgcgccaggaaccagttccggcgatgccatggcgttgatggaaaaccttgcgtcaaaattacctgcgggcattggttatgactggacgggtatgtcgtatcaggaacgcttatcgggaaaccaggctcccgctctggtagcaatttcctttgtggttgttttcctgtgccttgctgcactctatgaaagctggtcaattcctgtctcggttatgttggtagtgccgttagggattgtcggcgtgctgctggcggcgacactctttaatcaaaaaaatgacgtctactttatggtgggcttgctaacgacaattggcttgtcggccaaaaacgctattttgatcgttgagttcgctaaagatctcatggagaaagagggtaaaggtgttgttgaagcgacactgatggcagtacgtatgcgtctgcgtcctatcctgatgacctctctcgcctttattctcggcgtattaccgctagctatcagtaacggtgccggcagtggcgcgcagaacgctgtgggtatcggggtaatgggaggaatggtctctgcaacgttgctggcaatcttcttcgtaccggtgttctttgtggtgatccgccgttgctttaaaggataaatcagaaacataaaggcgctttcgggtgcctttattatttccagtgaaacccataaaaattaataagatattcttctgctcactctttaaaagctttctatagttcccgctcccttcactatttttacaattcacataatttgtcattattcattccgcaagatttataacctccggtgataaaatggcattcagctcgttaataagagagttaacttattaagcgttagcgtttattactgaggtaacaccatgaaaagattaattcctgtggcattgctcaccgcattgctggcgggctgtgctcacgattcgccctgcgttccggtttatgacgatcagggtcgtctggttcacaccaatacctgtatgaaaggcacgactcaggataactgggaaacggctggggctattgccggcggggcagctgctgttgctggcctgacgatggggatcatcgctctatcgaaataactgaacagggcgcggagttccgcgctctttttaacgatacagtatctctccataagataaaatattgctatattctgctgggtaattccctgctgatttagcatgttacatcgcgttatttcgctgctttcgaaataacgcatcaatttaattttcacacttcccaccagaaatatactcacgctaacaatcattattctgcttagtaaaacacgcgtaaatattttgcgccaaaatgtggcgcatgtttcattttcgcaccattgcggggcgctgtttttattatttcctgtctacactcagcttattgcgacgcgaaatcgtgcgcaaaagctggcactacttttgcttataagaggatggccacagacaggtaaaagacgtttcccaaacgtcctataacgataattttcgcctcacaggaagcattatgaaaaagatgatgatagccacactggctgccgccagcgtgctgcttgccgttgcaaatcaggcgctgctggcgcgacgcttgatgccgttcagaaaaaaggttttgtgcaatgcgggatcagtgatggattacctgggttctcttatgccgatgctgacggtaagttttcaggtattgatgttgatatttgtcgtggtgttgccgctgctgtatttggtgacgacacgaaagtgaaatataccccgctcactgcaaaagaacgcttcaccgctttacagtcaggggaggtggatttgctctcccgtaatacgacctggacttcatctcgcgatgccgggatgggaatggcatttaccggcgtcacttattacgacggcattggcttcctgacgcacgataaagcggggctaaaaagcgcgaaagaactggatggcgctaccgtctgtattcaggcgggtactgataccgaactcaacgtcgccgactacttcaaggcaaacaatatgaagtacacaccggtgactttcgatcgctctgacgaatcagcgaaggcactggaatctggtcgctgcgatacgctggcctcggatcaatcacaactgtatgccctgcgcatcaaattaagcaacccagctgaatggattgtcttaccggaagttatctcaaaagaaccgcttggtccggtagttcgtcgtggcgatgatgaatggttctcgattgtacgctggacgcttttcgccatgctgaatgctgaagagatgggcatcaattcccagaacgtcgatgaaaaagcggctaatccagcaacgcctgatatggcacatctgctgggtaaagaaggcgattacggcaaggatctgaagctggataataaatgggcctataacatcatcaaacaggtgggtaactactcggaaatttttgagcgtaacgtaggttcagaaagcccgctgaaaattaaacgtgggcaaaataatctctggaataacggcggtattcagtacgcaccgcccgtgcgttaagtcggtgtgaggtaacgagcgtcgctacggcggcgctctcttcagcgttatgctttccgaggtttctatgtctcatcgccgctcaaccgttaaaggctcactctcttttgccaaccctacggttcgcgcctggttattccagatccttgccgttgttgctgttgtcggcattgttggttggttatttcacaacactgtaacgaatctcaataatcgtggcattacttcaggttttgcctttctggatcgcggcgctggcttcggtattgtccagcatttgatcgattaccagcagggcgacacctacggacgcgtttttattgtcggcttactcaatacgctactggtttctgcattgtgtattgtgttcgcttctgttttgggcttctttatcggtctggcgagactttcggataactggctgctacgaaagctttccacaatttatattgagatcttccgtaatattcccccgctgctgcaaatcttcttctggtactttgccgtgttgcgcaatttgcccggaccacgccaggctgtgagcgcgtttgatctggcctttttgagcaatcgtgggctttatattccgtcaccgcagctgggagacggatttattgcgtttatcctggctgttgttatggctatagtcctttctgttgggctattccgctttaataaaacataccagataaagaccggacaactgcgccgcacctggccgatcgccgcagtgttgatcattggtttgcctttactggcgcaatggctttttggcgcagcactacactgggatgtcccagccctacgaggctttaacttccgcggcgggatggttttaattcctgaactggcagccttaacgctggcactttcggtttatacatctgcatttatcgccgagattatccgcgctgggatccaggcagtgccttatggtcaacatgaagcggctcggtcactgggattacccaacccggttacgctacgccaggtcattattccccaggcattgcgggtgattattccaccgttaaccagccagtatctcaacatcgtcaaaaactcctctcttgccgccgctattggctatcccgatatggtttcgctgtttgccggcaccgtgctgaatcagacgggcaagccatcgagacgatagccatgaccatgtcggtctatctgattatcagcctgactatctcgctgctgatgaatatctataaccgccgcatcgcgatcgttgaacgctaaggagtcatgatgacaaaagtattgctgtctcatcccccgcgcccggcgagccataactcaagccgcgcgatggtgtgggtgcgaaaaaatctgttctccagctggagcaatagcctgctgactattggctgcatatggttgatgtgggaactgatcccaccgttgctgaactgggcatttttgcaggctaactgggttggctcaacgcgtgccgactgcacaaaagccggtgcctgttgggtcttcatccacgaacgatttggtcagtttatgtatgggctttacccacacgaccaacgctggcgaattaacctcgcattactgattgggcttgtgtcgatcgcaccaatgttctggaaaatactcccgcatcgcggtcgctatattgcggcctgggcggtgatttacccactgattgtctggtggctgatgtatggcggtttttttgctcttgagcgggttgaaacccggcaatggggcgggctgacgctaactttaattattgcatcagttgggattgcgggggcgctaccgtgggggatcttactggcgttaggtcgccgctcccatatgccgattgtgcgtatcttatcggtcatttttatcgaattctggcgcggcgtgccgctgattaccgttctgtttatgtcttcggtcatgctgccgttgtttatggcagaaggcaccagtatcgacaaattgatccgcgcgctggttggcgtgatcctgtttcagtcagcatatgttgcggaagtcgtgcgaggtggattacaggcgctgcctaaagggcaatatgaagcggcagagtcgctggcgttgggttactggaaaactcaggggctggttattctgccacaggcgttgaagctggtaattcctgggctggtaaataccatcatcgcactcttcaaagataccagcctggtgatcattatcgggttgttcgatcttttcagtagcgttcagcaggcaaccgttgatcccgcctggttgggtatgtcgacggaagggtatgttttcgccgcgctgatctactggatcttctgtttcagcatgtcgcgctatagccagtatctggaaaaacgttttaacaccgggcgtacaccgcattgaggacactatgagccaaattttactgcaacctgctaacgcgatgattacgctggaaaacgtcaataaatggtatggacaattccatgttttgaaaaatataaatttaaccgtgcaaccgggagaacggatcgttctgtgtggcccttcaggttccggtaaatcgacaaccattcgttgtattaatcatctggaagaacatcaacagggacggatcgtggtagatggcatcgaacttaatgaagatatccgcaatattgagcgcgtcaggcaggaagtgggaatggtctttcagcatttcaatctcttccctcatctgaccgttttacagaactgtaccctggcaccgatttgggtacgcaagatgcctaagaaagaggctgaagatctggcggtgcattacctagagcgggtgagaattgccgaacatgcgcataagtttcccggacagatttcaggtggtcagcagcaacgcgttgccattgcgcgttcgctgtgtatgaagccgaaaattatgttgtttgatgagccaacgtcggcgctcgatcctgagatggtgaaagaggtgctggatacgatgattgggctggcgcagtcgggtatgacaatgttgtgtgtaacacatgagatggggtttgcacgaaccgtcgctgaccgggtaatttttatggatcgtggggaaatagtggagcaagctgcacctgatgaattttttgcgcatcctaaatcagagcgtacgagggcatttttatcgcaggtaatccattaattgaatgttagttcgaaaagcaaaaaggccatcctttcggatggcctttcgcttgatttgatgtctggcagtttatggcgggcgtcctgcccgccaccctccgggccgttgcttcgcaacgttcaaatccgctcccggcggatttgtcctactcgggagagtgttcaccgacaaacaacagataaaacaaaaggcccagtcttccgactgagccttttgttttatttgatgtctggcagttccctactctcgcatggggagaccccacactaccatcggcgctacggcggtttcacttctgagttcggcatggggtcaggtgggaccaccgcgctactgccgccagacaaattcttttctaatctgccgaactttaacctaaaaagtggtgctgatacccagagtcgaactggggacctcacccttaccaagggtgcgctctaccaactgagccatatcagcacgctaaatttgatgcctggcagttccctactctcgcatggggagaccccacactaccatcggcgctacggcgtttcacttctgagttcggcatggggtcaggtgggaccaccgcgctacggccgccaggcaaattctgttttatcagaccgcttctgcgttctgatttaatctgtatcaggctgaaaatcttctctcatccgccaaaacagcttcggcgttgtaaggttaagcctcacggttcattagtaccggttagctcaacgcatcgctgcgcttacacacccggcctatcaacgtcgtcgtcttcaacgttccttcaggacccttaaagggtcagggagaactcatctcggggcaagtttcgtgcttagatgctttcagcacttatctcttccgcatttagctaccgggcagtgcattggcatgacaacccgaacaccagtgatgcgtccactccggtcctctcgtactaggagcagcccccctcagttctccagcgcccacggcagatagggaccgaactgtctcacgacgttctaaacccagctcgcgtaccactttaaatggcgaacagcatacccttggggacctacttcagccccaggatgtgatgagccgacatcgaggtgccaaacaccgccgtcgatatgaactcttgggcggtatcagcctgttatccccggagtaccttttatccgttgagcgatggcccttccattcagaaccaccggatcactatgacctgctttcgcacctgctcgcgccgtcacgctcgcagtcaagctggcttatgccattgcactaacctcctgatgtccgaccaggattagccaaccttcgtgctcctccgttactctttaggaggagaccgccccagtcaaactacccaccagacactgtccgcaacccggattacgggtcaacgttagaacatcaaacattaaagggtggtatttcaaggtcggctccatgcagactggcgtccacacttctaagcctcccacctatcctacacatcaaggctcaatgttcagtgtcaagctatagtaaaggttcacggggtctttccgtcttgccgcgggtacactgcatcttcacagcgagttcaatttcactgagtctcgggtggagacagcctggccatcattacgccattcgtgcaggtcggaacttacccgacaaggaattttcgctaccttaggaccgttatagttacggccgccgtttaccggggcttcgatcaagagcttcgcttgcgctaaccccatcaattaaccttccggcaccgggcaggcgtcacaccgtatacgtccactttcgtgtttgcacagtgctgtgtttttaataaacagttgcagccagctggtatcttcgactgatttcagctccacgagcaagtcgcttcacctacatatcagcgtgccttctcccgaagttacggcaccattttgcctagttccttcacccgagttctctcaagcgccttggtattctctacctgaccacctgtgtcggtttggggtacgatttgatgttacctgatgcttagaggcttttcctggaagcagggcatttgttgcttcagcaccgtagtgcctcgtcatcacgcctcagccttgattttccggatttgcctggaaaaccagcctacacgcttaaaccgggacaaccgtcgcccggccaacatagccttctccgtccccccttcgcagtaacaccaagtacaggaatattaacctgtttcccatcgactacgcctttcggcctcgccttaggggtcgactcaccctgccccgattaacgttggacaggaacccttggtcttccggcgagcgggcttttcacccgctttatcgttacttatgtcagcattcgcacttctgatacctccagcatgcctcacagcacaccttcgcaggcttacagaacgctcccctacccaacaacgcataagcgtcgctgccgcagcttcggtgcatggtttagccccgttacatcttccgcgcaggccgactcgaccagtgagctattacgctttctttaaatgatggctgcttctaagccaacatcctggctgtctgggccttcccacatcgtttcccacttaaccatgactttgggaccttagctggcggtctgggttgtttccctcttcacgacggacgttagcacccgccgtgtgtctcccgtgataacattctccggtattcgcagtttgcatcgggttggtaagtcgggatgacccccttgccgaaacagtgctctacccccggagatgaattcacgaggcgctacctaaatagctttcggggagaaccagctatctcccggtttgattggcctttcacccccagccacaagtcatccgctaatttttcaacattagtcggttcggtcctccagttagtgttacccaaccttcaacctgcccatggctagatcaccgggtttcgggtctataccctgcaacttaacgcccagttaagactcggtttcccttcggctcccctattcggttaaccttgctacagaatataagtcgctgacccattatacaaaaggtacgcagtcacacgcctaagcgtgctcccactgcttgtacgtacacggtttcaggttctttttcactcccctcgccggggttcttttcgcctttccctcacggtactggttcactatcggtcagtcaggagtatttagccttggaggatggtccccccatattcagacaggataccacgtgtcccgccctactcatcgagctcacagcatgtgcatttttgtgtacggggctgtcaccctgtatcgcgcgcctttccagacgcttccactaacacacacactgattcaggctctgggctgctccccgttcgctcgccgctactgggggaatctcggttgatttcttttcctcggggtacttagatgtttcagttcccccggttcgcctcattaacctatggattcagttaatgatagtgtgtcgaaacacactgggtttccccattcggaaatcgccggttataacggttcatatcaccttaccgacgcttatcgcagattagcacgtccttcatcgcctctgactgccagggcatccaccgtgtacgcttagtcgcttaacctcacaacccgaagatgtttcacttcagagttgcgaaaatttgagagactcacgaacaactttcgttgttcagtgtttcaattttcagcttgatccagatttttaaagagcaaaacttcgcagtgaacctttgcaggtacactctgaagtattttttatttaatcactacagagatggtggagctatgcgggatcgaaccgcagacctcctgcgtgcaaagcaggcgctctcccagctgagctatagccccataacatgtagttaaaacctcttcaaatttgccgtgcaaatttggtaggcctgagtggacttgaaccaccgacctcacccttatcaggggtgcgctctaaccacctgagctacaagcctgtagaggttttactgctcattttcatcagacaatctgtgtgagcactgcaaagtacgcttctttaaggtaaggaggtgatccaaccgcaggttcccctacggttaccttgttacgacttcaccccagtcatgaatcacaaagtggtaagcgccctcccgaaggttaagctacctacttcttttgcaacccactcccatggtgtgacgggcggtgtgtacaaggcccgggaacgtattcaccgtggcattctgatccacgattactagcgattccgacttcatggagtcgagttgcagactccaatccggactacgacgcactttatgaggtccgcttgctctcgcgaggtcgcttctctttgtatgcgccattgtagcacgtgtgtagccctggtcgtaagggccatgatgacttgacgtcatccccaccttcctccagtttatcactggcagtctcctttgagttcccggccggaccgctggcaacaaaggataagggttgcgctcgttgcgggacttaacccaacatttcacaacacgagctgacgacagccatgcagcacctgtctcacggttcccgaaggcacattctcatctctgaaaacttccgtggatgtcaagaccaggtaaggttcttcgcgttgcatcgaattaaaccacatgctccaccgcttgtgcgggcccccgtcaattcatttgagttttaaccttgcggccgtactccccaggcggtcgacttaacgcgttagctccggaagccacgcctcaagggcacaacctccaagtcgacatcgtttacggcgtggactaccagggtatctaatcctgtttgctccccacgctttcgcacctgagcgtcagtcttcgtccagggggccgccttcgccaccggtattcctccagatctctacgcatttcaccgctacacctggaattctacccccctctacgagactcaagcttgccagtatcagatgcagttcccaggttgagcccggggatttcacatctgacttaacaaaccgcctgcgtgcgctttacgcccagtaattccgattaacgcttgcaccctccgtattaccgcggctgctggcacggagttagccggtgcttcttctgcgggtaacgtcaatgagcaaaggtattaactttactcccttcctccccgctgaaagtactttacaacccgaaggccttcttcatacacgcggcatggctgcatcaggcttgcgcccattgtgcaatattccccactgctgcctcccgtaggagtctggaccgtgtctcagttccagtgtggctggtcatcctctcagaccagctagggatcgtcgccttggtgagccgttaccccaccaacaagctaatcccatctgggcacatccgatggcaagaggcccgagggtccccctctttggtcttgcgacgttatgcggtattagctaccgtttccagtagttatccccctccatcaggcagtttcccagacattactcacccgtccgccactcgtcagcgaaacagcaagctgtttcctgttaccgttcgacttgcatgtgttaggcctgccgccagcgttcaatctgagccatgatcaaactcttcaatttaaaagtttgatgctcaaagaattaaacttcgtaatgaattacgtgttcactcttgagacttggtattcatttttcgtcttgcgacgttaagaatccgtatcttcgagtgcccacacagattgtctgataaattgttaaagagcagttgcgacgcggctttcagctcactgtcgcgaggtggcgtatattacgctttcctctttcagagtcaaccctgaatttcaggatttttttctcttcgttgttccgaccatcctgtgaagtgtttcacgttgtcgtctcaacggaggcgcattatagggatcccaattttttgcacaagtatttttttgatctttttttctgtttgttgttttttcaccctttttgctgcaatcgcacacaaaacggtgcttttttgcatactaaaagacttgcacaaggccaataatgcccccaaagtcattagtaaatcatttattgctgaggtaagtatgtctgatgttttacgcccataccgcgatctttttccacaaatcggtcagcgcgtaatgatcgacgatagcagtgtcgtgattggtgacgttcgtctggctgatgatgtggggatctggccgctcgttgtgattcgtggagatgtacattatgtacagatcggagcacgcaccaatatccaggatggcagtatgttgcatgtcactcataaatcctcgtacaacccagatggcaacccattaaccattggcgaagatgtcactgttggtcacaaggtgatgctccacggctgcaccattggcaatcgagttttggttgggatgggctcaattttacttgatggcgcaatagtagaagatgatgtgatgattggtgcgggtagtctggtcccacaaaataaacggctggagagcggatatctgtatctcggtagccccgtcaaacagatccgcccgttaagtgatgaagagaaggctgggttacgctattccgcgaataattacgtgaaatggaaggacgaatatctggatcagggtaaccagacccagccttgatcatcttcactttgttcctgaattaagttttccgcttcttcttccaggtcccagcgatgctgacgaaaactcgctaaccactgttctggcgtatctccagtaaagcgatacgccagactctcgccagagatcgcgcatgtcagttgcataccattcacgagagcgggaaaacatacacattttttattctcgtcccactcttccctgtccggaaactggatggcctgattcacgcggacaattcctcctgcaattgctttataactggttctacgtcaggcagaacaccgtgccagagaagaaaggcatgagccgcctgtgccaccagcattcctaaaccatcagcattacgctttgagcctcgctgctcacaccatgccagaaaaggagtttttcctttctgatagaacatgtcatagcaataaatgcctggatgaatgagcgatgacgggatcgccggaatatcaccactgatgccactggatgttgcattaataatgagatcaaactcatgaccttccagttcgtccatactcaacgcctgaatactgccagtgtgcgcaaacaatttagccaactcttccgcgcgggataccgtccgattagttattgtcaccgcacagtccagggaaaggagtggcagtagtacgccgcgagatgctccaccagcgccgataagcagaatacgtaaaccagggcggataaaagacagacgttccagatcgcttaacaagcctacaccatcggtattgtcacccagcaggcgtccatcttctaaccgcatgagggtattaacagcaccagccaacgctgcccgttcagtaagctcatccgctctggcaaaagcctcttctttaaaaggcaccgtcacattcgcacctttaccaccagcactaaagaaagcgttcagtgtgttgatgaaatcattgatgggtgccaacacgcgcccatagggatgttcaatattcagttgctgagcaaattgctgatgaatgaatggcgatttgctgtgggctatcggattaccaaaaacagcataggtttccattatgttacccctgtcgaaacagttcacccgtcagggcatcgcggatttctgaaggatttaaacgcccccccgtttcaccaggcacaaccgggaacgccgcgccaaattgtgcgcgaacttcgtctactgttcgacaaggtggcaatccactcaagttggcactggtagaaaccagcggtttaccataagcctggcacaaagcaaccaccaacggatggtcggtgactcgtacagcaagcgaatcaaagcggcccgtcaaccagcgcggtgttgtcgcaggcgcgggaaagacaaaggtgacaggacctggccagcgggaaaaaatggtttcacgctgcacgtcagtcaacatggtgtcatcaatatagggtttaagctgctcgtaatttgctgcgattaaaatcagccccttatcaaccggacgctgttttaactccaacagtcgcatcactgctgtttcgctatcaggatcgcacccaacaccgaaaacggcttccgttggataggcgatgacacgttcttcattgagaacatctatcgcagctgcgatagcgtctctttgcaggttattattcacgttattattccgccgaaaccggctttccacattgtttactggcacaaaagtgttttacaccctgcgcggttttcttttcgatgagtagcggataatgacactcagggcattctccagctatgggtttgaagttaatggcaaattgacactccgggtagcgatcacaagagtgaaatgttttgccataacgggagcggcgctggaccagatggcccgtccgacattgggggcatgtaattgctgtttcgtccggtttatcgataagttcggtatgttcgcattcagggtagttaatgcaaccaataaacataccaaagcgtccctggcgtaataccagatttgcgccacatgcagggcaaacctgcccctccagaactttgacgatatgtccatccgctgaagatttcagaggacggacgtagtcacacgccggatactgtgagcatccaagaaacggaccgtgtttcccggatccgaataaccagttcagccccgcactttgggcaggactcattattacgcaccgtgaacagtgctgatttcgccataacaacttatgctgaattaaagaaatgattaatgcagcataccttcattcacttcaaagagtaattcttccatttgctggtacgcattttcgcagcccggaatattgaacaacaccatcaggatcacccatttcagatcatccagttcgaactctgcgttatccagcgcgagcactcgctctatcaccatttcacgagtttcaaggttgagcacctgaatctgctcaaggaaaagcagaaacccacggcagctggcatccagtcgttcacactcttccggtgtataaatacgcatggagagaggatccgaggccagttgcatcggttctgccaacccttcctgataatcagcaagtttttccagccatagcagggcattgtagatatcttctcgctcaaaacctgcgtcggtaagatcctgttcaagtttgtcttgatccacacgcaactcagcttctgtgtgaatataggtttcaaacaaatacattagtacgtcgaacatggcatgccctcctcaatcggacatagccgccgggtacagctgcgatccatcctgctaactccagttcgagtagttgagtaactacctctggcacaggttggccggcacgttcagcgacgacgtcaacaggtgttacctcatctcctacgttagccaggagctcaggaaatggcaatgccacgtcttgctgatctggtgaataaaatgaattttcaggggcgtctggcaaccagtgcaatccaaattgcaagttttccagaatttcttccggttccgtcacaagaatcgcaccttgttttattaaccagtgaggcccttcgcttcccggattccctattggacctggcaaggaaaaacttctcgcccctgctcaagcgcacaacgtgctgtcaccagcgaaccactacgcaaagccgcttccaccaccagtacacctttacttagaccactgataatgcgatttcttcgtgggaaattgtaagcaaggggtggaacatcgaggggaaattccgagacgagagcgcccccctgttcaagcagactggcagccagtcgggcatgacggcggggatgaatggtattaagtccattccccaatacagcaatgctgacgccatttacctgtaaggctgctttatgcgctacaccatcgattccacgcgccagtccactcgtaattgtcactccacgcgtcgccagagtttcgcaaaataatcgtccccatcgctcgccataccatgaatgcgcccgactccccactacggcaagctgaaatgaatgcagcgcgtgcagttctccttcaacaaacagtgcgccggggtaatctgtcgtcgccagaagttgaggaggataaaattcgctgtccgcaggaattaaatgatggttgggttgctccaaccaacaaagtgagctttcgatactctttcgtggaaatgaaagaaagcgttgtgcctgccgcaatgtaagccctgtttgctgcaatacaaccgcatcaatatgcgactgttttgccacccagtgagcgatacggaccatatcatcgccgtacaagctgctgatactcattaaacgcagccaaatttctgtatcgaccatccttatctccctgccataagcagccttagcaatctttgcgattggtcagtgatgctgtcaatcagagggggatttgtctagaatagaagaaataatctttctaactcctgaacacatctctggagatttatgtcagttttgcaagtgttacatattccggacgagcggcttcgcaaagttgctaaaccggtagaagaagtgaatgcagaaattcagcgtatcgtcgatgatatgttcgagacgatgtacgcagaagaaggtattggcctggcggcaacccaggttgatatccatcaacgtatcattgttattgatgtttcggaaaaccgtgacgaacggctagtgttaatcaatccagagcttttagaaaaaagcggcgaaacaggcattgaagaaggttgcctgtcgatccctgaacaacgtgctttagtgccgcgcgcagagaaagttaaaattcgcgcccttgaccgcgacggtaaaccatttgaactggaagcagacggtctgttagccatctgtattcagcatgagatggatcacctggtcggcaaactgtttatggattatctgtcaccgctgaaacaacaacgtattcgtcagaaagttgaaaaactggatcgtctgaaagcccgggcttaaggataagaactaacgtgtcagaatcactacgtattatttttgcgggtacacctgactttgcagcgcgtcatctcgacgcgctgttgtcttctggtcataacgtcgttggcgtgttcacccagccagaccgaccggcaggacgcggtaaaaaactgatgcccagcccggttaaagttctggctgaggaaaaaggtctgcccgtttttcaacctgtttccctgcgtccacaagaaaaccagcaactggtcgccgaactgcaggctgatgttatggtcgtcgtcgcctatggtttaattctgccgaaagcagtgctggagatgccgcgtcttggctgtatcaacgttcatggttcactgctgccacgctggcgcggtgctgcaccaatccaacgctcactatgggcgggtgatgcagaaactggtgtgaccattatgcaaatggatgtcggtttagacaccggtgatatgctctataagctctcctgcccgattactgcagaagataccagtggtacgctgtacgacaagctggcagagcttggcccacaagggcttatcaccacgttgaaacaactggcagacggcacggcgaaaccagaagttcaggacgaaactcttgtcacttacgccgagaagttgagtaaagaagaagcgcgtattgactggtcactttcggcagcacagcttgaacgctgcattcgcgctttcaatccatggccaatgagctggctggaaattgaaggacagccggttaaagtctggaaagcatcggtcattgatacggcaaccaacgctgcaccaggaacgatccttgaagccaacaaacaaggcattcaggttgcgactggtgatggcatcctgaacctgctctcgttacaacctgcgggtaagaaagcgatgagcgcgcaagacctcctgaactctcgtcgggaatggtttgttccgggcaaccgtctggtctgatagtccactcttctaagcccggtcttgccgggcgtttttatacttatgaaaaaacaacgtaatttacgtagcatggcggcccaggccgttgaacaagtcgtcgagcaagggcaatcattaagcaacattctgccaccgctccagcaaaaagtttccgataaagacaaagcacttcttcaagagttgtgctttggcgtactgcgtacgctttcgcagttagactggctgattaataagttaatggcccgtccgatgaccggcaaacagcggaccgtgcattacctgattatggttggtttgtatcaactgctttatacccgcattccacctcatgctgcgctggctgaaacggttgaaggcgctatcgcaattaagcgtccgcaacttaaagggttgataaacggtgtattacgccagttccagcgtcagcaagaagagttattagccgagtttaatgccagtgatgcacgttatctgcatccttcctggttgctgaagcgtctgcaaaaagcgtatccagagcagtggcaatccatcgtcgaagccaataaccagcgtccgccaatgtggctgcgtattaatcgtacgcatcattcccgcgacagctggcttgcattgctggatgaagcaggaatgaaaggtttcccgcatgcggattaccctgatgctgtacgtctggaaacacctgcacctgttcatgcgctacctggttttgaagacggatgggttaccgttcaggatgcatcagcacaaggttgcatgacctggcttgcgccacaaaacggtgaacacattttggatctttgtgccgcccccggcggtaaaacaacgcatatccttgaggtggcaccagaagcgcaggttgttgcggttgatatcgacgaacagcgcctctctcgggtttacgacaatttaaaacgccttggtatgaaggcgaccgtgaaacaaggtgatggccgttacccttctcaatggtgtggcgagcaacagtttgatcgcattttattagatgcgccttgttcagcaaccggtgtgattcgtcgccatccagatattaaatggttacgtcgcgatcgcgatatcccggaactcgcgcaattgcagtctgaaattctcgacgccatttggccgcatttaaaaaccggtggaactctggtctatgccacctgttcggtgttaccggaagagaatagcctgcagattaaagcctttttgcaacgtaccgctgatgccgaactttgcgaaacaggaacaccagagcaaccgggtaaacaaaatctacctggtgccgaagagggcgacggcttcttttacgctaagctaatcaaaaagtgatgagataacgggtcgcgactgatgaaaattatcattctgggtgccggccaggttggcggcacactggcggaaaacctggttggcgagaacaacgatattactgttgtcgataccaacggtgagcgtctgcggaccttacaggataaatttgacctgcgggtcgtgcaggggcatggctctcatccacgcgtattgcgggaggcaggtgccgacgacgccgatatgctggttgctgtaaccagttcagatgaaaccaatatggttgcctgccaggtagcctactcacttttcaacacccctaatcgcatcgctcgtatccgctcaccagactacgtgcgcgatgccgataagctatttcattcagatgctgtgccgattgatcatctgatcgcaccagagcagttggttatcgataatatttaccgactgattgagtatcccggcgcattgcaggtggtgaacttcgctgagggtaaagtcagcctggctgtggttaaagcctattatggcggcccgctgattggtaatgcactttcgaccatgcgcgaacatatgccacatatcgatactcgtgtggcagcaattttccgccacgatcgccccattcgtccgcaaggttcgaccattgttgaagctggtgatgaagtgttctttattgccgcttcacagcatatccgcgcggtgatgagtgaattacagcgactggaaaaaccgtataagcggatcatgctggttggtggcggtaatatcggtgcagggctggcgcgtcgtctggaaaaagattacagcgttaaactcatcgaacgtaatcagcagcgcgctgccgaactggcggaaaagttacagaatacgatcgtcttttttggtgatgcgtcggatcaagaactactggccgaagaacatatcgatcaagttgatctgtttattgccgtcaccaacgatgacgaggccaatatcatgtccgccatgcttgccaaacgtatgggtgcgaaaaaggtgatggtattgatccagcgtcgcgcttatgtggatctggttcaggggagcgttatcgatattgcgatttcaccacaacaagcaactatttctgcgttgcttagccatgtgcgaaaagcagatattgttggtgtttcctcattgcgccgcggcgtagcagaagctattgaagccgttgctcacggtgatgaaagcacctcacgcgttgtcggcagagtcattgacgaaatcaagctaccgccaggaacgattattggagcggtggtacgtggaaacgacgtgatgattgccaatgacaatctgcgcattgagcaaggcgatcacgtaattatgttcctcacagataaaaagtttattaccgacgtcgaaagactcttccagccaagccctttcttcttgtaattaataaggcgtctaatgacgccttattatttccctttgattatcaaggattaattaaattcattcctggcaggaaaatggcttaacatttgttagacttatggttgtcggcttcatagggagaataacatgagcattattaaagaatttcgcgaatttgcgatgcgcgggaacgtggtggatttggcggtgggtgtcattatcggtgcggcattcgggaagattgtctcttcactggttgccgatatcatcatgcctcctctgggcttattaattggcgggatcgattttaaacagtttgctgtcacgctacgcgatgcgcagggggatatccctgctgttgtgatgcattacggtgtcttcattcaaaacgtctttgattttctgattgtggcctttgccatctttatggcgattaagctaatcaacaaactgaatcggaaaaaagaagaaccagcagccgcacctgcaccaactaaagaagaagtattactgacagaaattcgtgatttgctgaaagagcagaataaccgctcttaacaagcgcctgaaagcagaagaccagtggtaaaaaagtgatttactttcttgccactggcctcccagttcccccgattgccatgttttccttttcgcatgtaactgcctttccccttcttatttttctctacgcgctgtcggaataagggatcatgtagtaatgcttctatcgcattatcctttatctgccctttagtatgctgatatcgactcataaaaactccagttggttatttaacggcgcgagtgtaatcctgccagtgcaaaaaatcaacaaccactcttaacgccactcgccccttgttcaagagcttcaagaatcgaacaataaacactgctatgagcagtcccacaacaggcatcgttaaggcgttgcaaggaacgctgcatactctgcaactcggctatccgtgcttcgacttcctgcaatctttcctgcacaatgccttttgactcctgacaggtatggtgttcaggatcgatgcggatcgacagcaactcgcggatcgactccagactgaaacctagttgtctggcatggcggataaatttcaatcgctggagatcgctttcggtatataggcgaaacccaccttcagtacgcacttcatgctccatcatctgctgtttttcgtaataacgaatcgtgtcgggtgttacttccgccatttttgccagctcaccaatgcgatacatacatactccactagttatcgttgattttgtccaacaacttgtcagcataatcgccgcgtaaaaaatcggtactcaatccagcttgtcgcagcttcaattccagtaatgacaatcgacggctaacctcttgatattgcggatcatcgtgacggatacctttgagaatatccagaagctgaattgcttctctccgttgctcaagttctggcggtaagcaaccggcattcttcagcaagcgataccccgcacgtaattccggtggcacgtgagaatcatcatccagtatcaatggttcgccgctacctgccaggttatcaaactcacctttcgcttgcgcttctgctatatggcgctctgcccactggtcaagtaaccacataaatactccaggggatgaacaaaaagagtacagctattgtagataagtggggatactacgggtataaaaaaacccgccggggcgggtttttttacgttgcttcagattactctgcagcagcttctgctttctctgaacgatcaaccagctcgatgtaagccatcggcgcgttgtcgcctgcacggaagccacacttcagaatacgagtgtaaccaccggcacggctcgcgaaacgcgggcccagttcgttaaacagttttgccacgatctcgttatcacgagtacgggcgaatgccagacgacgattagcaacgctatcagtcttggcaagagtaatcagcggctcaactacgcggcgcagctctttcgctttaggcagagtcgtcttgatgatttcatgacgaaccagtgaacctgccatattgcggaacatagcctggcgatggctgctgttgcggttcagttgacgaccactcttacgatggcgcatgaccttatccttctcagtaaaaccttaacctgtgatccggttactcgtcagcgatgcttgccggtggccagttttccaggcgcatgcccagagacagtccacgggaagccagcacgtctttaatctcagtaagagattttttaccaaggttaggcgttttaaggagctcaacctcggtacgctgtaccagatcaccgatatagtggatagcttctgctttaaggcagttagcagagcggacagtcaattccagatcgtcaacagggcgcagcaggatcggatcgaactctggtttctcttctttcacttcaggctgacgtacatcacgtaagtcaacgaaagcttccagttgttcagccagaatggttgccgcacgacgaatcgcctcttcaggatcgattgtgccgttggtttccatttcgatgaccagcttgtccaggtcggtacgctgttctacacgcgctgcttcaacattgtaggcaatacgctccacagggctgtagcatgcgtcgaccagcagacggccgattgggcgctcatcttcttccgaatgaattcgggtagaagccggcacataaccacgaccgcgctgaactttgatacgcatgctaatagacgcgttctcatcggtcaggtggcagatcacgtgctgcggcttgacgatttcgacatcaccgtcgtgggtgatatcggctgcagtcacagggccaatgccagatttattcaaggtaagaataacttcatctttgccctgaactctcaccgccagccctttcaggttgagcaggatttccaggatatcttcctgaacgccttctttggtgctgtactcatgtagtacaccatcaatctcaacctcggtcaccgcgcaacccggcatcgatgagagcagaatacggcgcagtgcgttacccagagtatggccaaagccacgctctaaaggctcaagggtcaccttggcgtgcgtcgaactcacttgctcgatatcaaccaggcgcggttttagaaactctgtcacagaaccctgcattgtgtcctctctttggtactaagctttacttggagtaaagctcgacgatcaggtgttcgttaatgtccgcagacagatcagaacgctccggcttacgcttaaacgtaccttccatcttgccagcatcaacttccagccaggttggcttttcacgctgctcagccagctccagagcggctttcacgcgagactgcttcttcgctttctcacgaatgcttacaacgtcattcggactaacctgataagaagcgatgttaacaacacgaccgtttaccataattgctttatggctaaccagctgacgtgcttctgcacgagtggcaccgaagcccatacggtatacaacgttgtccagacgaccttccagcagagccaacaggttttcaccggtgttgcctttcagacgtgctgcttctttgtagtagttacggaactgacgctccagcacaccatagatacggcgaactttttgcttttcacgcaactgcacaccatagtcagacagacgcggtttacgcgcaccgtgctggccaggagcttgttcaattttacacttggtatcgatcgcgcgaacgccagacttaaggaataagtcggtgccctcacgacggctcagcttgagcttaggacccaaatatcttgccattttctttctccaacaaacctggaaaacgaggcgttatacgcgacgttttttcggcggacgacaaccgttatgagggatcggagtcacatcagtaatgttagtgatgcggaaacctgcggcgttcagagcacgaatagtagattcgcggcctggacccggacctttaaccataacttccagattcttgatgccgtattctttcacggcgtcagcgcaacgctctgctgcaacctgagctgcaaacggagtggatttgcgagaaccacggaaaccggaaccaccggctgttgcccaacccaacgcgttaccctgacgatcagtgatagtcacgatggtgttgttgaaagaagcatggatatgagccacgccgtcagagacttgttttcttacacgtttacgtgcacgaattggtgcctttgccattattcaatcaccccgattatttcttgatcggtttgcgcggacccttacgggtacgtgcgttggtcttggtacgctgaccgcgaaccgggagaccacgacgatgacgcaaaccgcgatagcaaccaagatccatcaggcgcttgatgctcatgctgatttcacggcgcagatcaccttcaacgacaaatttggcaacttcgtcacgcagcgtgtcgatttgtccttcagacagctcactgatcttaacatcttcagcgatacccgctgcagccaggatggctttagaacgggtcttgccgacgccataaatcgaagttaatgcgattacggcatgcttatgatcaggaatgttaatgcctgctatacgggccactatgcactcctactatttaatatgtacgttccatgctgaaaagcccgttttcaggatactcaaatggaaacgcacagacatacaaaagattggctggctaatctagccagctcaacccaactttgcaagaaaaatatgcgaaaaaatcagccttggcgctgtttatgcttcggctcggcactgcaaatcacacggatgacaccatcacgcttaacgattttgcagttacggcataatttcttgacggaagcacgaactttcatttttactctccgtaacttctcgggcgaccaattatcggccgtagcctttcaggttcgccttcttcaatgcagactcatactgactggacatcatcagagtttgcacttgagccataaagtccataatcacgacaacaacgataagcagtgaggtcccaccgaagtagaacggtactttcattgcatcacgcatgaactccgggatcaggcagataaaggtaatatacagcgcaccaaccagggtcaggcgggtcattactttatcgatatacttcgccgtttgctctcccggacgaattcctggtacaaatgcaccggacttcttcaggttatctgctgtttcacgcgggttgaaaaccaacgccgtgtagaagaaacagaagaagatgattgcagacgcatagagtaacacataaagcggttgcccaggctgcaaatacagcgaaattgttgtcagccagttccaaccagtaccgcccccgaaccatgacgcgatggtcgccgggaacagaataatactggaagcgaagattgccgggattacccccgccatattcactttcagcggtaaatgtgtgctctgtgcagcatagacacgacgaccttgctgacgtttcgcgtagtttaccacaatgcggcgttgaccacgctcaacaaatacaacaaagaacgtcactgcaaatactaatactgcaaccaacagcaacacgaggaagtgcaggtcgccttgacgcgcttgctcgatagtatgggcaatggctggcgggagtcccgcgacaataccggcgaagataatgattgaaataccgttgccgatacctcgttcagtaatctgttcgcccaaccacatcaggaacatggttcctgtgaccagacttacaacagcggtgaagtagaatgcaaagcccgggttaatcaccaggccttgcataccaggcatattcggcagaccggtagcaataccgatcgactggaatattgccagcaccagagtaccgtagcgggtgtactggctgatcttacgacgaccagactccccttctttcttaatttctgccaacgttgggtgaaccaccgtcagcagctggataatgatcgacgccgaaatatacggcatgatccccagagcaaagatagaagcacggctgagagcaccaccagagaacatgttaaacatctcaatgatggtgcctcgctgttgctcaagcagtttggcaagtacagcggcatcaataccagggatcggaataaaagagccaatacggaacacaatcagcgcaccgataacaaacagcagtctgcgtttcagctcgcctaagccacctttggcactttgaaaatctaatcccggttgtttagccatctgctacttattcctcgattttaccgccagcagcttcgatagcagcacgagcgcctttagtaacacgcaggccacgaacagttaccggagtcgttacttcgccagccaggatcactttcgcgaactcgatctggataccgataatgttagccgctttcagcgtgttcaggtctactacaccgccttctactttagccaggtcagacagacgaatttcggctgtaatcgctgctttacgagaagtgaagccgaatttcggcagacgacggtacagaggcatctgaccaccctcgaaaccgcgacgtacgccaccgccagaacgagacttctgacctttgtgaccacgaccaccggttttaccgaggccagaaccgataccacgacccaggcgtttacccgcctttttggagccttcggccggagacagagtatttaaacgcatctcttactcctcaactttaaccatgaaggaaaccgcgttgatcataccgcgaatagcaggagtatcctcgcgctctacggtgtgaccaatacgacgcagacccaggccaagcagcgttgccttgtgtttcggcagacgaccgattgcactgcgggtttgagtaattttaatagtctttgccatggtttatttccccagaatttcttcaacggatttaccacgcttggcagcgaccatttctggagaattcatattttccaggccatcaatagttgcacgaaccacgttgatcgggttggtggaaccataggctttagccagaacgttatgaaccccagcgacttccagaacggcgcgcattgcaccaccggcgatgataccggtaccttcggaagccggctgcatgaatacgcgagaacccgtgtgaacacctttaacagggtgttgcagagtgccgttattcagcgcgacgttaatcatattgcgacgggctttttccatcgctttctggatcgctgctggaacttcacgcgctttaccgtaaccaaaaccaacgcgaccgttaccatcgccaactacagtcagagctgtgaaggagaaaatacgaccacctttaacggttttagatacgcggtttaccgcgatcagcttttcctgcagttcgccagcttgtttttcgatgtgagccatcttacacctctaccttagaactgaaggccagcttcacgggcagcatctgccagtgcctggacacgaccatgatattggaacccggaacggtcaaaggatacatctttgatgcctttttccagagcgcgttcagcgacagctttacccacagctgcagccgcgtctttgttaccggtgtacttcagttgttcagcgatagctttttctacagtagaagcagctaccagaacttcagaaccgttcggtgcaattacctgtgcgtaaatgtgacgcggggtacgatgtaccaccaggcgagttgcgcccagctcctggagcttgcggcgtgcgcgggtcgcacgacggatacgagcagatttcttatccatagtgttaccttacttcttcttagcctctttggtacgcacgacttcgtcggcgtaacgaacacccttgcctttataaggctcaggacgacggtaggcgcgcagatccgctgcaacctggccgatcacctgcttatcagcgcctttcagcacgatttcagtctgagtcggacattcagcagtgatacccgcaggcagctgatggtcaacaggatgagagaaacccagagacaggttaatcacattgcctttaaccgctgcacggtaacctacaccaaccagctgcagcttcttagtgaagccttcggtaacaccgataaccattgagttcagcagggcacgcgcggtaccagcctgtgcccaaccgtctgcgtaaccatcacgcggaccgaaggtcagggtattatctgcatgtttaacttcaacagcatcgttgagagtacgagtcagctcgccgtttttacctttgatcgtaataacctgaccgttgatttttacgtcaacgccggcaggaacaacgaccggtgctttagcaacacgagacattttttcctccgattaggctacgtagcagataatttcgccaccaagaccagcctggcgcgctgcacgatcagtcataacacctttagaggtagaaacaactgcgatacccagacccgccataactttcggcagctcatctttacgtttatagatgcgcagacctgggcggctgacacgctgaatgctttctacaacagctttgccctggaaatacttcagagtaagttccagttcaggcttggtgtcgccttcaactttaaaatcttcaataaaaccttcttccttcagcacgttggcgattgccactttcagcttggaggaaggcatggtgaccgcagctttgttcgcggcctgaccgttacggatacgggtcagcatatccgcgatcggatcttgcatgctcatctgtctttactcccgtgattcaattggtgacaattaccagctagcctttttcagacccgggatttcaccgcgcatagcggcttcacggaccttaatacggctcaacccgaacttccgcaggaaaccatgcggacgacctgtttgacggcagcggttacgctgacgagacgggctggaatcacgcggcagagtctgcagcttgagaacagcgttccaacgatcttcgtcggaagcgttcacatcagagatgatcgctttcagttcagcgcgtttcgcgaagtatttatcagctaaagctacgcgttttacttcgcgtgctttcattgattgcttagccatttagtaaccctaccttacttgcggaacgggaagtcaaaggcagccagcagagcgcggccttcttcgtcagatttcgcagtagtggtaatggtaatatccaaaccacgaacgcggtcgactttatcgtagtcgatttctgggaagatgatctgctcacggacacccatgctgtagttaccacgaccgtcgaaagacttagcggacaggccacggaagtcacggatacgaggtacagcaatagtgatcaggcgctcaaagaactcccacatgcgttcgccacgcagagttactttacagccgatcggatagccctgacggattttgaagcctgcaacagatttgcgtgctttggtgatcagcggtttttgaccggagattgctgccaggtctgctgctgcgttatccagcagttttttgtcagcgatcgcttcaccaacacccatgttcagggtgatcttctcgacccgagggacttgcatgacagaattgtagttaaactcagtcatgagttttttaactacttcgtctttgtagtaatcatgcagtttcgccatcgtactactccaaattacttgatagtttcgctgttagacttgaagaaacggacttttttaccgtcttcgaatctaaagcctacacggtcagccttgccggttgccgcattgaagattgctacgttggaaacctgaatagcggcttctttttcaacgatgccacccggttggttcagggccggaaccggcttctgatgtttcttaaccaggttgataccttcaacaatgaccttgccggaagacaggacattcttaactttaccgcgtttacctttatctttaccggttaacacgataacttcgtcatcacgacggattttcgctgccatgattcgctccttagagtacttctggtgccagagagataattttcatgaacttctcactacgaagctcacgagttaccggcccaaaaatacgcgtaccgataggctgctcgctgttgttgttcagaagaacacaagcattaccatcgaagcgaatgacagaaccgtccgggcgacgaacacccttcttggtgcgcaccactaccgccttcagcacatcaccttttttgaccttaccacgcggaattgcttctttgatggtgatcttgatgatgtcgcctacgcctgcgtagcgacggtgcgagccacccagaaccttgatacacattacgcgacgtgcaccggagttgtcggcgacgttcagcatagtctgttcttggatcattttagtgctccgctaatgtcaactactactgagacccgaaaatcaggtcgttaaaaatccccatatcgagggcgcggcattataacaccgcttcaaggatatgggtagaaaaaataaacggctcatttctgagccgtttattcgtattgagagagtgtactgtattacagaaccgctttctctacaacgcgaaccagcgtccaggatttagtcttggacagcggacggcattcgcggatttcaaccacgtcaccgataccgcattcgttgttctcgtcatgtacgtgcagtttggtcgtacgcttgatgaatttaccgtagatcgggtgtttcacaaaacgttcgatagcaacaacaatggatttctccattttgtcgctaacaacgcgaccttgcagagtacggattttatcggtcattacgcacccgccttctcgttcagtaaagtcttaacgcgtgcgacatcgcgacgcacttgcttcaacaggtgagactgttgcagctggccacttgcagcctgcatacgcaggttgaactgctcacgcagcaggttcagcagctcggtgttcagctcttcaacgctcttctcacgcagctcttttgctttcattacatcaccgtcttagttacaaaggtggttttaatcggcagtttcgctgctgccagcttgaatgcttcacgggccagctcttccggaacaccgtccatttcatacaggactttacccggctgaatcaaggcaacccaatactccacgttacctttacctttacccatacgcactgccagcggcttttcagtgatcggtttgtccgggaacacacggatccagatcttaccttgacgcttaactgcacgggtcatagcacgacgtgctgcttcgatctgacgggcagtcagacgaccacggccaacagctttcagaccgaagctgccgaagctaacatccgtaccctgcgccagaccgcggttacggcctttgtgcattttacggaattttgtacgctttggttgtaacatcagcgacgctccttatttacggcctttacgctgctgctttttaggctgagcagccggtttttccggttgttcaacagcagccataccacccaggatctcgcctttgaagatccacactttaacgccgattacaccgtaagtggtgtgcgcttcagaggtgttgtagtcgatgtcagcacgcagagtgtgcagcggtacgcgaccttcgcggtaccattcggtacgtgcgatttccgcgccgcccagacggccgctaacttcaactttaatacctttagcgcccagacgcattgcgttctgtacagcacgcttcatagcacgacggaacataacgcgacgttccagctgagaagtgatgctgtcagcaaccagttttgcgtccagttcaggcttacgaacttcggcgatgttgatctgtgcaggaacgccagcgatgtccgctacgaccttacgcagtttttctacgtcttcaccttttttaccgataacgatacccgggcgagcagtgtgaatggttacacggatgctcttagccggacgctcgataacgatacgagatacggacgctttagccagttccttagtcaggtactgacgtactttaaaatcgctgtccaggttgtcagcgaattctttggtgttcgcaaaccaggtagagttccatggttttacaatacccaggcgaataccattaggatgtactttctgacccattgctagtctccagagtctcagcgatcggacacaaccacagtgatgtggctggtgcgcttcaggatgcgatctgcacgaccttttgcacgcggcataatgcgcttcatgctcgggccttcgtctacgaaaattttcgtaactttcagatcgtcaatgtcagcgccatcgttgtgttcagcgttagcaatggcagattccagaactttcttgaccagtacagccgctttcttgttggtgtaggtcaaaatatccagagcctgcgacactttcttaccgcgaatcaggtcagcaacaaggcgaaccttctgagcagaagaacgagcatggcgatgtttagcgatagtttccatctcttcctcctaccttatttcttcttcgcttttttatcagcagcgtggccgcgataagtacgagtcggtgcgaattcacccagtttgtgaccaaccatttcgtcggttacaaataccggaacgtgctgacgaccattatggacagcgatggtcaaaccgatcatgttaggaaagatcgttgaacgacgggaccaagtgcgcaggggcttcttgtctccgctttccaccgctttctctaccttcttcagcaagtgcaggtcaataaaaggacctttcttgagagaacgtggcatggcttatcctctaaaattatttgctacggcgacgtacgatgaatttatcagtacgcttgttgctgcgggtcttcttacctttggtctgaacgccccacggagttaccgggtgcttaccaaagttacgaccttcaccaccaccatgtgggtggtctaccgggttcatcgcggtaccgcgaacggtcggacgaacaccacgccagcgtgcagcacctgctttacccagaacgcgcagcatatgctcagcattgccaacttcgcccagagttgcacggcagtctgcttctactttacgcatttcaccagaacgcagacgcagggtgacataagcaccatcacgagcaacgatctgaacgtaagtaccagcggaacgtgccagctgaccgcctttacctggtttcatttctacgttatgaacagtagaaccaaccgggatgttgcgcatcggcagggtgttacctggtttgattgcagcatcaacgccagactgaatctggtcgccagctttcaggcctttaggggccaggatgtaacggcgttcaccgtctttgtacagaaccagcgcgatgttcgcggaacggttcggatcgtactcaagacgttcaacaactgccgggataccgtctttgttgcgtttgaagtcaacaatacggtaagcctgcttgtggccaccaccgatatgacgagtggtgatacggccattgttgttacgaccaccggatttgctgtttttttccagcaacggagcaaaaggtttgcccttgtgcagctcagggttaaccactttaactacgtggcgacgacccggagatgtcggtttacatttaacaactgccattgtattactcctccgacttactcagcgccgccaacgaagtccagattctggccttctttcagggtgacgtaagcttttttccagtcgctacgacgaccgatacgctgtccgtgacgtttaactttccctttaactaccagggtgttaacgacttcgacttcgacttcaaacagtttctgcacagcagctttgatttctgctttggtcgcgtctttagcaactttgagtacgatggtgttggatttttccatcgcagtagacgctttttcagaaacgtgcggtgcacgcagcaccttcagcagacgttcttcacgaatcatgccagcatctcctcaacttgcttaacagcatcagcagtcattacgactttgtcgaaggcgatcaggctaaccgggtcgataccagttgcatcgcgtacgtcaaccttgtgcaggttgcgcgcagccaggaacaggttttcgtccagctcaccggtgatgatcagcacatcttccagagccatgtctttcagtttctgtgccagcagcttagttttcggcgcttctacagagaacttctcgacaacgatcagacgatcctgacgtaccagttcggacaggatgcttttcagcgcgccgcggtacatcttcttgttaactttttgactgtggtcctgcggacgagcagcaaaggtcacgccaccagaacgccagatcgggctcttgatagaaccagaacgcgcacggccggtgcctttctggcgccacggttttttaccggaaccagttacttcagcacgagtcttctgagcacgagtaccctgacgagcaccagctgcataagcaacaacaacctggtgaaccagcgcttcgttgaaatcacgaccgaaggtagtttcggaaacagtcagcgcgctctgcgcgtctttcaatactaattccattgctatctccttacgccttcacagctggtttaacgatcaggtcgctaccggttgcacccgggacagcacctttaaccagcagcaggttgcgctcagcgtcaacgcgtactacgtcaaggctctgaacggttacacgttcgttacccatctgacctgccattttcttgcctttgaacactttgcccggagtctggttctgaccgatagaacccggaacgcggtgagacaaggagttaccgtgagtagcgtcctgggtacggaagttccagcgcttaacggtacctgcgaaacctttacctttagaggtgccagttacgtcaacttttttaacgtcagcaaacagttcaacgctaatgctctgacctacagtgaactcttcgccttcagccaggcggaattcccacagaccacggccagcttctacgccagctttagcgaagtggccagcttcaggcttggtcacacggttagcttttttagcaccggtggtcacctgaatagcacggtagccatcgttagccaggtctttaacctgagtaacgcggtttgcttcaacttcgattacggttactgggatagaaacgccgtcttctgtgaagatacgggtcatacccacttttttaccgactaaaccaatcattgtttcaacctctcaatcgctcaatgacctgattaacccaggctgatctgcacgtctacaccggcagccagatccagacgcatcagagcatcaacggttttctcggttggctcaacgatgtcaaccagacgcaagtgagtacggatttcgtactgatcgcgcgcgtctttgttgacgtgcggggagatcagaacagtgaagcgctctttgcgtgtcggcagcgggatcggaccacggacctgcgcaccagtgcgcttggcagtctcgacgatttccgcggttgcttgatcgatcagacgatgatcaaacgctttcaggcggatacggattctttggttctgcatgagaccagagctccaattattttataaacgaaaatgattactcctcagacccattacgattgatgggagagtgtaaccgttcttacgtagctccccgattgggagcattgttaggtagccaaattcggctaactgaggttcagattgaacctgctgtcaactacgacaagcccgcgcattatacatacttaaccaccgaacgcaagcgtattgctagtaaagtaaacagccttcgggttatctctcaagttcgttcagtgcatttttgacacgctctcttaaaccggctttctcttcgctttcttccacagtattttcttcgtcttcagaagaagagggggcattctcaaccgcgacgcctgggtcatcttcctcctcgacggattcgacgacggggagtggctgttttttgaagaaatagtgttgtgttgattgtttaaaagcgggcgtttcagcctctacagtgacttcggcttttactatccaaagcacccatagctgcctggcatacccaccaaccagcaccattcctgcaaaccacaggcaaatcagtaataaacaaattacatatattatggtgctgtgtttttgtcgggagaagataccagggtgacctgtttctttctgctcacgcgcggcgatatagaattcaaacatgtcatttccccttcactgttgtttccggggaaatatttgcttcatcccgatataagtaggcactctcccctgccacctgccagagatgtactaacgttgaaaagccaacaacaccgtcagttttcaagtggtggcttttttgaaattgctttattttttctaccaacaagggacgccactccgccgaaggttctgtcgaaatatgcaatgcgcggtttaacatcgtttccagccagagaatctcttcctcgctgctatcacgcgtaatggtactctccccttccggcgacattttccacaacagaagataatcacccgtccataccgactcaaaccatttatgtgtcagcgtccacgtttgctgacctacgaggacatcaacgctagcctcaccgacgcgaacgaccacaacaggcaattttttgtccccgactttaagcgatgcgatccagggcaaattctgatctaccaatgtttgtaaagaagcattcccacttttacatgccagccccgctcttactgcctgatcgcaccaggccgaatcagctgggacctcgtacccccatacgccgtataacacgcttagcgcctcactatcgcgcatcaccacatgagcaatatccttagtcatatcttgtttaactactggcgttacgggtatcagccacgcaggaacgggtaacgtagctgtaaaagaggacagcagtagccaaccacaggtaagagcgataatggttccactcatcaccacggcaagctgcattttccgggggcggttatcacccaatatgcggtaaatcattcgccattgttttgctgtgaaaacgctggtctgctcggcttgctgtaataagcgaattgtttcgccggcaagcgccagctttctgcgatcgccccgacataataaagctatccgtttcagaactctggcggttaaaaggagatcgggttggtcaatattctgaccttcaaggatgcttgccttaagttcgtgctccgtcagacgtcctatcgagacaagttcaatgccctgttttttaaaatcacgttcgacttttcgatcgggtctgccgatcagcaaaaattgaccgtcaggaataagagatattgcgcgttggagatcatcaagtatgcggcggtgattcaggtgagcattttcaataataataagagggcagcgactatcagttcgatgaagcgcatgcagtaattgccccgccatctcatctcgcgtccaggcgctgtcacggcagccctgttcagccgcgttatcgtcggtaacgatccatgcggccttaccttgccaggaaacaacgaggcttaaagtaatcacacggcgatgtttatctttttgcagttgctgcgccagccaggtttttccacttccagcctcacccaacaaatagcatagacgccaggtttgacgtttctcacacaaccaggaaagaataacttctcttctcgtagacatagaacttcctgttttaattattgattatccttaatcataaaaataatgtatgtatttattaattaaatacatattactaatataaataaattttgcttgattcatgcaagcggcattaatactatttatactaacgtcaatatacaacccacccaatctattttattagaacatacatcgtgcccacactacgtttccccttccatctggcgaatcataataaagatgctgccatcaatatattgattatatttataagcatagggtcgattatttttaatgtgaattatttccatacaactatagttaaaaatggacagatcattaatcaaccaacaaacgcatttcagtctgatttcagccttgccgctttatggcgtaacgaaaatcatgctggggtaaaagatgcaaatcccgtggcagttaatcaggaaacacctaagctctctatagcgcttaatggcattgtactcacatcgaatgatgagacttcttttgtcttaattaatgaggggagcgaacaaaagcgatactccctcaacgaagcccttgagtcagcgccgggaacgtttattagaaaaataaataaaaccagcgttgtgtttgaaactcacgggcattacgaaaaagtaactctccatccagggctacctgacatcatcaagcagcctgattcagaaagtcaaaatgtactcgctgattatattatcgccacgcctatacgtgatggagaacagatatacgggcttcgattgaaccctcgtaagggcctcaatgcatttaccaccagcttgctacaaccaggggatatcgccctcaggatcaataatctttcgctgacccaccctgatgaggtttcacaggcattaagtttactgctaactcaacaaagtgctcagtttacaattcgtcgcaacggcgtaccccgcttgataaatgtttccgtcggggaacttacaggaatgaatggactgcgtcatgaaaggactcaataaaatcacctgctgcttgctggcagcactactcatgccttgtgcaggacacgctgagaacgaacaatacggcgcgaacttcaataacgccgatatccgccagttcgtggaaatagtgggtcagcatcttggcaaaacgatcctgatcgacccttcggtacagggaaccatttccgtacgcagtaatgatacgtttagccaacaggagtactaccagttctttttaagtattcttgatctttacggttattccgtgatcacgctggacaatggttttctgaaagtggttcgctcagctaatgtaaaaacatcgccagggatgattgctgacagttctcgtccaggcgtaggtgatgagttggtcacccgaattgtaccgcttgagaacgttcctgctcgtgacctggcccccctgctccgccagatgatggatgcgggtagcgtcggtaatgttgtgcattatgaaccctccaacgttcttattctgaccggtcgtgcctccaccattaataaactgattgaagtcataaagcgcgttgatgtcatcggcacagagaagcagcaaattattcatctggaatatgcgtcagcggaagatctcgccgagattcttaatcaattaatcagcgaaagccacggtaaaagccagatgccagccctcctctccgcgaagattgtggcggataagcgaaccaactctcttatcatcagtggaccggaaaaagcacgccagcgcatcacttcattactgaaaagccttgatgtcgaagagagcgaggaaggaaatacccgggtttattacctgaaatatgctaaagccacgaatctggtggaagtgctaaccggtgtttccgaaaagctgaaagatgaaaaagggaatgcgcgtaagccctcctcttctggcgcgatggataacgtcgccattaccgccgatgaacagactaactctctggtcattaccgctgaccagtccgtccaggaaaaactcgccacggtaattgcgcgtctggacattcgccgtgcacaggtgctggttgaggcaatcatcgttgaagttcaggatggaaatggactaaacctcggcgtgcaatgggcgaataaaaacgttggcgcacagcaatttaccaataccggattaccgatttttaacgctgcgcaaggtgtggctgattataaaaagaatggtgggatcaccagcgcgaatcctgcctgggatatgtttagcgcctacaatggcatggccgcaggcttcttcaatggcgactggggagtactgcttaccgcgctggccagtaacaataaaaatgacatcctcgccaccccaagcatcgtaacgctggataataaactcgcgtccttcaacgtggggcaggatgtgccggtgctatccgggtcacagaccacttcaggggataacgtctttaataccgtcgaacgcaaaacggtggggacaaaactcaaagttactccgcaggtcaatgaaggcgacgcggtgttgctcgaaatagagcaggaagtctccagcgttgactcttcctctaactcgacgctcggcccgacgtttaatacccgtactattcaaaacgccgtgctggtcaaaaccggtgaaacggtggtcctgggcggattgctggatgatttttctaaagagcaagtgtcaaaggttcctctgcttggcgatattcctttagtggggcaactcttccgctatacctccaccgagcgcgctaaacgcaacctgatggtatttatccgtccgacgattatccgtgacgatgatgtttatcgctcactgtcaaaagagaaatacacccgttaccgtcaggagcaacaacagcggatcgacgggaaatcaaaagcgctggttggctcggaagatttgccggtgctggatgaaaacacgttcaacagtcacgcccctgcgccatcgtcacggtgaggcattcatatgagaattcactcaccgtaccccgccagttgggcgctggcacaacgaattggttatctctattcagagggcgagattatttatctcgccgatacgccattcgagcggttactcgatattcaacgtcaggttggccagtgccagaccatgaccagcttgtcacaggctgattttgaagctcggctggaagcggtattccatcagaataccggtgagtcgcaacagattgcgcaggatatcgatcaatccgtcgatcttctctcgctttcggaagagatgcccgcaaatgaagatctcctgaatgaagattcagcggcaccggttatccgcttgatcaatgcgattttgagtgaggccatcaaagaaaccgcctctgatatccacattgaaacctatgaaaaaacaatgtcgatccgttttcgcatcgacggcgttttgcggacaattttacagccaaacaaaaaactggcggcactgcttatctcccgaattaaggtcatggctcgtcttgatatcgccgaaaaacgtattccacaggatggaagaattagtttgcgtatcgggcgacgtaacatagatgtccgcgtatccacactgccgtccatctatggtgaacgcgccgtactccgcctgctggataaaaacagcctccagctttcattgaacaacctggggatgacggcagcggataagcaggatttagaaaatctcattcagcttccgcacggtattatcctggtgacagggccgacaggctccggtaaaagcaccacgctctacgccatcctttcggcgctgaatactcccggccgcaatattctgacggtagaagatcccgtggaatatgagctggaaggcattgggcaaacgcaggtgaatacccgtgtggatatgtctttcgctcgcggcctgcgcgccatacttcgccaggacccggatgtcgtcatggtgggggaaattcgtgatacagaaaccgcgcagattgcggttcaggcctcgctcaccggccatctggtactctcaacactccacactaacagtgcatcaggcgcagtgacccggctccgcgacatgggcgtcgaatcattcctgctttcgtcttccctggcagggattatcgcgcaacgtctggttcgtcgcctgtgtccgcaatgccgacaattcacgcccgtatcaccccaacaagcgcagatgtttaaatatcatcagctcgcggtgacaacaattggcactcccgtaggctgccctcattgccatcaatccggctatcaggggcgcatggcgatccacgaaatgatggtggtgacgccggaattacgggccgctattcatgaaaatgtggatgaacaagcactggagcgactagtccggcaacaacacaaggccttaatcaaaaatggcctgcaaaaagtgataagcggtgacacctcctgggatgaggttatgcgcgtcgccagtgccacgctggagagcgaagcatgaattatcgctatcgcgccatgacccaggatggtcaaaaattgcaagggatcattgatgctaacgatgaacgtcaggcacgactgcggctgcgtgaagaagggcttttcctgctggatattcgcccccaaaaaagttcgggagtaaaaacacgtcgcccgaggatcagccatagtgaactgacgcttttcacccggcagttggcaaccttaagcgcagcggcattacccctggaagagagccttgccgtaatcggtcaacaaagcagtaataaacgactgggtgacgtgttaaatcaggtacgcagcgccatccttgaagggcatcccctttccgatgcattacagcattttcccacgcttttcgattcgctctatcgtaccctggtaaaagcgggcgaaaagagcgggctgctggccccggtgttggaaaagctggctgattacaatgaaaaccggcagaaaatccgcagcaagctcattcagtcactgatctacccctgtatgctcactacggtggcgattggggtcgtgattattctcctcactgctgtcgtgcccaaaattaccgaacagttcgtgcatatgaagcagcaactgccgctgagtacacgcattcttttaggtctgagcgacacgttgcaacgtaccggcccgacattattagcgacagtgtttattgtcgctgtaggtttctggctctggttaaaacgcggcaataaccgccaccgttttcatgccatgttgctgcgcgttgcgctcatcggcccgctgatttgcgccattaacagcgcacgctatctccgcactttaagtattttgcaatccagcggcgtccctctgctggatgggatgaatttgtccaccgaaagcctcaacaacctcgaaattcgccagcgtctggcaaatgcggcagagaacgttcgccagggtaacagcattcatctttcgctggaacaaaccgcaattttcccgccgatgatgctctacatggtggcctctggcgaaaaaagcgggcagctcggcacattaatggtcagagccgcagataaccaggagacactccaacaaaatcggatcgccttaacgctctccatcttcgagccagcactcattattacgatggcactgatcgtcctgtttattgtcgtgtcggtactccaacctcttcttcaacttaactcaatgattaattaaggaaagcatatgcgcgcaacggataagcaacgcggttttacattactggaaattatggtggtgatcgtcattatcggcgtacttgccagcctggtggttcctaacctaatgggcaataaagaaaaggcggataagcaaaaagccgtcagcgatattgtggcgctggaaaacgcccttgatatgtacaaactcgacaatcatcactatccaaccacaaatcaggggcttgaatccttagtagaagcgccgacactgccaccgctggccgcaaactataacaaggaaggttatatcaagcgtctgcctgccgatccctggggcaatgattatgtcctcgttaatcctggtgaacatggtgcatacgatctgctttcagcagggcccgatggtgaaatgggaaccgaggacgacatcaccaactggggtttgagcaagaagaaaaagtaagtcagcgatgaatcagcaacgcgggtttaccctgctggagatgatgctggtgctggcgctggtcgctatcacggcaagcgtggtgctcttcacatatggccgggaggatgtcgccagcactcgtgcgcgcgaaacagcggcgcggtttaccgctgcacttgaattagccatcgaccgcgccacgctcagtggtcagcctgtcggtatccatttctctgattcagcatggcgcattatggtaccgggcaaaacaccatcagcctggcgctgggttccattacaagaagatgccgcagacgagagccaaaatgactgggatgaagaactctcaattcatcttcagccatttaaacctgatgacagcaaccagccacaggttgtgattctggccgacggacaaatcacgcccttctctttgttgatggctaacgccgggaccggtgagccgctcctgacgttagtctgttcaggctcatggcccctggatcaaacgctcgccagagatacccgcccatgaacaaacaatcagggatgacactgcttgaagtcttactggcgatgagtattttcaccgctgttgctctgactttaatgagcagtatgcaagggcaacgaaatgccatcgagcgaatgcgtaacgagacgctggcattgtggatagcggataaccagcttcagtcacaagattcattcggcgaggaaaacacgtccagttctggcaaagagttaataaatggcgaagagtggaactggcgcagcgatatccactcaagcaaagacggcacgcttctggaacgcaccataacggtgacattacccagcggtcagacaacctcgcttacgcgttatcaaagcatcgataataaatccgggcaggcacaagatgattaatcgccagcagggtttcacattgctggaggtcatggcggcgctggcgattttctcaatgcttagcgtgctggcgtttatgattttttcgcaagcttccgagttgcatcaacgctcacagaaagaaatccagcagttcaatcagctacagcgcaccatcaccattcttgataacgatctcctgcaactggtcgcccggaggaatcggagtacggacaaaatcatggtgttgggtgaagaagctatttttaccacgcaaagtcgcgatccgctggctcctctcagtgaagcacaaaccttactcactgttcactggtatctgcgaaatcatacgctctaccgtgctgttcgtacttctgtggatggcaggaaggatcaacccgcccaggcgatgctggaacatgtcgagagctttcttctggaaagtaacagcggggaaagccaggaacttcctctctcagtcacgttacatctgcagactcagcaatatggggggttacagcgccgttttgcattacctgagcagttagcgagagaagagtcgccagctcagacgcaggccgggaataataaccatgaataatgaacaacgcggcgtcgcgctgctcattgtactcatgttactggcgctcatggctgctctggcagcagacatgacgctcagttttcacagccagcttcagcgaacccgccaggtaaaccatcatctgcaacggcaatatgatattgaactggcggagaaacttgcgcttgccagcctcacccaggacgttaaagataacgacagacagaccacgttgcagcagtactgggcacagccacaacagttgcagctggaagatggcaatacagtgaagtggcagttacgcgatgcccagcactgttttaatctcaatgcgttagcaaaaatctctgacgacccgctggcttcccctgatttccccgcccaggtattcagtgcgctgctgattaacgccggtatcgatcgcggaaacaccgatgagatcgtgcaatcaatcgctgactatattgatgtcgatgactcaccacgctttcacggcgcagaagatagcttttaccaaagccagacgccgccccggcatagtgccaatcagatgctttttctgactggcgaattacgtcagataaaaggcataaccgaaaacatctatcagcggcttatcccgtatgtctgcgttctcccgaccacggaacttagcatcaatcttaatatgctaacggagaacgatattccgctcttcagagcgttattcctcaataacatcacggatgctgacgctcgggtcttattgcaaaaaaggccgagggaaggctggctaaccacggatgcatttctttactgggcgcagcaggatttctccggtgtgaagccactggttgctcaggtgaaaaggcatctctttccctatagccgctattttacgctgagtacggaaagtatcagcgacgaacaatcccagggatggcaaagccatatttttttcaaccgtaaacagcagagcgcccaaatctatcggcgtacgctgcaactctactaatcataaggatcgtgatgcctgaatcgttgatggtcatacgttcttcctcgacgctgcgtaagcattgggaatggatgacgttctccgcagatagcgtatcttcggtacatacgctcacggacgatcttccgctggagtcgctggccgatcagcccggtgccggaaatgttcatcttttgatcccaccagagggccttttatatcgttccctcacgctgcccaacgccaaatacaaactcaccgcacaaacattacaatggctggcagaggagacgttacccgacaacacccaggactggcactggacggttgtcgataaacaaaacgaaagtgtcgaggtgataggcattcagtcggagaaactcagtcgctatcttgagcgtttacatactgccggactcaacgtgacgcgggttttgccagatggctgctatcttccctgggaagtagatagctggactctggttaaccagcaaacaagctggctcattcgcagtgccgcacatgccttcaacgaactggatgaacactggttacagcatcttgctgcccagtttccgcctgagaatatgctttgttatggtgtagtacctcacggcgttgcagcggccaatccacttatccagcatcctgaaataccatcactgagtttgtattctgccgatattgcattccagcgctatgacatgctgcatggtatttttcgtaaacagaaaactgtaagcaaatcgggaaaatggctcgcccgcctggcagtaagctgtctcgttctcgccattctttcttttgttggcagccggagcatcgcgctctggcatacgcttaagattgaagatcaacttcagcaacaacagcaagaaacctggcaacgttatttcccgcagatcaaacgcacccacaattttcgtttttactttaagcagcaactcgctcagcaatatcctgaagctgtgccgttgctctatcatttacaaacacttctgctggaacaccctgaactgcagttaatggaggcgaactatagccagaagcaaaagtcgctgaccttaaaaatgagtgctaagagtgaagctaatatcgatcgtttctgtgagttaacacagtcctggcttccgatggaaaaaacagaaaaagatccggtcagtggtgtatggacagtaaggaactcagggaaatgattaaatcatggtgggcagaaaaatccacatcggaaaaacagatcgttgcggcactggcggttctctcgctcggcgttttttgttggcttggggtgataaaaccgatagatacctacattgcagagcatcagtcccacgcgcaaaaaattaagaaggacatcaaatggatgcaggatcaagcgagcacccatggtttactcggtcatcctgcgcttacgcagcccatcaaaaatatccttctcgaggaagcaaaacgtgagaatttggctatcacgctggaaaacggcccggacaatactctgacaattcatcctgtcacagctcccctcgaaaacgtctcccgctggctcactacggcacaggtaacatacggtattgttattgaagaccttcagtttactcttgccggaaacgaagagatcaccctcaggcatttgtccttcagggagcaacaataatgacaatgctactgccgctcttcattctggttggttttattgcagattattttgttaatgccatcgcctatcacctctcgccgttggaggataaaacggcgttaacgtttcgccaggtattggttcatttcaggcaaaaaaaatatgcctggcatgatacagtgcccctgatactttgtgttgctgctgctatcgcctgcgccctggcacctttcacgcccatcgtgactggcgcactctttctctatttctgtttcgtactcacgctcagtgttattgattttcgcactcagctcctgcccgacaaactcaccttaccgctgctctggcttggcttggtatttaatgcgcagtatggattaattgatttacatgatgcggtttacggcgcggtagcgggctatggggtgctgtggtgtgtttactggggcgtctggttagtttgtcacaaagagggattgggctacggtgatttcaagctactggccgctgcaggcgcatggtgtggctggcaaacgttgccaatgatactgctgattgcctcgctgggtggcattggttacgccatcgtttcacaacttctgcaacgccggactataaccactatcgcattcggcccgtggcttgcgctcggcagcatgataaacctggggtatctggcctggatctcttattaaccgggagggttctccctcccgacacggctcaaccttcttcgcggatctgtgcttgcagataattttgcaggcccatcttctgaatcagatcaagttccgtttccagccagtcgatatggccttcttcatcacgcaaaatttctatcatcatatcgcggctgacgtaatcatgaacgctatcggcataaccaattgcctcacgcaaattcttcgcgccatccagctcaagtgccagatcagaacgcagcatttcctcaacatcttcaccaatgttcagtttgcccaggtcctgtaagtttggaagaccttccagaaaaagaatgcgctcaatataacgatcggcgtgtttcatctcatcaatggattcatgatactccacatcattgagacgtttgagaccccagtttttaaacattcgggcatggagaaagtactgattgattgcgacaagctcatttcccaacagtttgttgagataatttataactttagtatcacctttcattttttgactccttcgcttccactctttgaagagtagaacggcttacgagtaagtcaaaaaacacactccgtttatgcggactccttaaactccggcagctgcattaattcatcctccatcacttcacgcgcggcccggacacatttaccgcactgattgccgaccggaataaatttttttaattgctggaacgagtgaggggaaaactggcgcacagcctgacgaatttttttatcgctgataccattacaaagacaaacgtacatagagactcccgtatactttcttcaaaaataaatgaaaatagttcttatttcaattacggaaagactcttttttaagcaaagaatagaaatatgaataaaaataatgggctaccaaaagtagcccattgacaaaaaatgcggcgatactggaaggtatcgccaacacatttattgcttagtaaacggcgcgaagatttcgctaaatgcgtacttcggtgcctgttctttagtcaggccgtggaattccggagacaggttagtgccgcccggcaggtcgcgcgcgattgaccagataccaaccataccgagattacgcttctgcgcatcctgcatgaccagacgagcatcagagagatagaacacctcgccctgaacgtcgttcacgccaaccatcggcgtggtacccatcatagcgtcaatttctgcatcgctcttattgggatggaggcctttcaattgtgaatgcaggttggcaatcgcagacgttgcacacttaccgtgaatgttctggccttcggtatttgcagactgacaaatcgcgttaccgtagtccattgtcatcacgttcacacccgccagctcaacacctttcgctttggcatcgctcaggacattcatcccttccggcgtcaggccagtcggcagaattggcaaggtgtaccagatagcaatatctttgccttctgacttccatttatcctgcactttcttcacagcaaggttacgacgttcaatagatgcctgatccgcaacccaggtgccttcgatatcgaagtccaggactttgaggttcaggttatcaacgatgtcataataatgctgcatcagatcgtctacgttcttacaggaagcagccagcggagcgttgttagcaccaccgatagacagcatcacatcgccgccagcctcacgcagagctttgattttgctgtactgagcgtaattctgcataccgtaagcggtaccccatgtcggcagacaggtgttcgcatctttactcaccacaaacgccagcgtgaagtggttgacgttatgattcttagccagcgcagccagatccgggatcgtattcagcgtaaagtcgacatacggtgcataaacgtgtttcggccacgctttcttcggcgtacctacgcgctctttggttccggtccagtcaacaaaaacacgccacgggttgctgtcagaaggagaaactttctgcactttactctgagaaatgtagttcacaccgttaaagcgaatcagcgtatcgctggcataaagcgtttctggattaaactgcggcgcattattcagctcttcgttgctatagctctgagccttacctaacggcttccacgggcggctattgctaccggtggcgttttggttcgccaccagagcagggttgtcactttgcgtccagaacagcgcttcataagcctgcccatcaacaacaacgcgatcacctttcacgtacacagtggatgcggaccatgctttcgccggttcgtatttcttccacgggttatcgccgcccgggacaaagccccatgcgtcttgatcgacagaagttttataatgtgcatcgttataatctacgatgctgtccgcgctgtacgctttgctggcctggaaaccatccgcaacaatgacgccgccgttatcaatttcacaggtagtcgggttaccgtactgactcaattccgcagcggtagctgtacgctcgagacgccatgggttattggagttttcagcgctggtaccccgtgggcaatctttagacccaacccaccaggcgttcttgtaaacattaccattgaaaataacatggtaaatttcgctaccttcctggccgctccacgcttgcaatgagtaatcgttaacgctatccgctggtgttgatggctcgctgttatccggagttggggtcaccggtgtttccggagttggatcaaccggagtcacagcaccgccattattatccggcttaacggaacaggagccagggttaccatactggctgatttctgttgccgttgccgcgcgaacataacgccatgggttactggcatcgttttctttcgcatcgcctgggcaatttgccgcgcctacccaccaggcgttcttataaatgccgccgttatagataacgtaccatgtagaagaaccttcctgacctttccaggctactacagcatagttgtcgtttgacttatcagctggggctggctgaacatcaggagccggtttaacgtccggtgccggtttcacatccggtgaaggctgtggtgctgaagtacaggactgtggattactggtttctgagatttccgttgccgtagcggcacgaacataacgccatgggttgctggcatcattgcttttcgcatcacccggacagttagaagaggctacccaccaggcatttttatataccgcaccattaaagacgacataccaggtctgaccgccctgctgtttattccaggcaactacagaagaattagacggaacagtgccctgtgctggtgtagccgaaccgccattagccggcgtattggatgcaggcgtatttgaatttgaagaagatgagctgccgctcttttcgcaggaaagtgtattgccaaactgactaatttcagcagctgttgcggtacgctttaaacgccacgggttagttgcatcatttgctttcgcttttcccgggcaatttgtagaagaaacccaccaggcattttcataaattttgccatcgaaaataacctgatatttattaccaccttgttggttattccatgcttccattgccaatgctggcagagcggaacacaccagccccataccaatcatagatttagtaaatatatttaatttcattataatcccttgtgacgtaaaaactgcaaaacaaaagtcctacgcaggaattatttacgttttacgagaacccttcaatatgaattaaattacggcattaaaaataagaaaaaagcctgacaaatgaagcattttaaaaacagaaacattcatatttaaaatgttaaattgaattgatattttaaatatgaataatttattcgttctgacagtacgaataagatatgccgtcaacaaatgcaaaaagggcgccgaagcgcccttttcaattcaaaactaattaacgtgtaattagcccagaactttagcaacaacgcccgcgccaacggtacggccgccttcacggattgcgaaacgcagaccgtcgtccatcgcgatcgggtggatcagggtaacaaccattttgatgttgtcgcccggcattaccatctctacgccttccggcagttcgatggtaccagtcacgtcagtagtacggaagtagaactgcggacggtagcctttgaagaacggagtatgacggccgccttcatctttggacagaatgtacacttcagattcgaacttggtgtgcggcttgatggtgcccggcttagccagtacctgaccacgttcgatttcttcacgtttgataccacgcagcagaacacctacgttctcaccagcacggccttcgtccagcagtttgcggaacatttcaacgccagtacaggtagacttctgagtctctttgataccaacgatttcaacttcttcaccaactttgatgataccgcgttctacacgaccggtaacaacggtaccacgaccggagatggagaatacgtcttcgatcggcagcaggaacggcttgtcaatcgcacgctctggttccggaatataagaatccaggaagccagccagttccaggattttcgcttcccactctgcgtcgccttccagcgctttcagagcagaaccacgaacgatcggagtgtcgtcgcccgggaagtcgtactgagacagaagttcacgaacttccatttcaaccagttccagcagctcttcgtcatcaaccatgtcgcatttgttcaggaacacgatgatgtacggaacgcctacctgacgacccagcaggatgtgctcacgagtctgcggcatcgggccgtcagtcgcagcaactaccaggatcgcgccgtccatctgagcagcaccggtgatcatgtttttaacatagtcggcgtgccccgggcagtctacgtgtgcgtagtgacgggtcggggtgtcgtattcaacgtgagaagtgttgatggtgataccacgagctttttcttccggcgcgttatcgatctggtcgaatgcacgagcagcaccgccgtaggttttagccagtacggtggtgattgcagcggtcagagtagttttaccgtggtcaacgtggccgatagtaccaacgttaacgtgcggttttgtacgttcaaatttttctttagacacggctatattccttactatagtgctctccccttcaggagagagcacgggactttggtattaacccttaggcttatttaccacgggcttcaattacggcctgagcaacgttactcggcgcttcatcatacttcaggaattccatagtgtatgatgcacgacctttggtcagagaacgcagctgagttgcgtatccgaacatttcagacagcggtacttcagcgtggatcttaacgccagtaacttcagattcctgacctttgagcataccacgacgacggctcaagtcaccgataacgtcaccggtgttctcttccggagtttctacttcaaccttcatgatcggctcaagcagaactggtttcgctttcttaaagccttctttaaaggcgatagaagcagccagtttaaacgccagttcagaggagtcaacgtcatggtaagaaccgaagtgcagacgaatacccatgtctactaccgggtagcctgccagcggacctgctttcagctgttcctggatacctttatcaacggccgggatgtattcgccagggattacaccacctttaatgtcgttgatgaactcgtagcctttcgggtttgaacccggctccagcgggtacatgtcgataacaacatgaccatactgaccacgaccaccagactgtttcgcgtgtttaccttcaacatcggtaactttctggcggatagtttcacggtaagcaacctgcggtttacctacgttcgcttcaacgttgaattcacgcttcatacggtcaacgatgatgtcgaggtgcagttcgcccatacccgcgatgatggtctggttagattcttcgtcagtccatacacggaaagacgggtcttctttagccagacggcccagagccagacccattttttcctggtcagctttggttttcggttcaactgcgatggagattaccggctcagggaattccatacgttccagaatgatcggcgcatccgggtcacacagggtgtcaccagtggttacgtctttcagaccgatagcagcagcgatgtcgcccgcgcgaacttctttgatctcttcacgtttgttagcgtgcatctgaacgatacgaccgaaacgctcacgtgcagctttcacggagttcagtacggtatcaccagagttaaccacaccggagtaaacacggaagaaggtcaggttaccaacaaacgggtcggtagcgattttgaacgccagtgcagagaacggctcgtcatcacttgcgtgacgttcagccggagtgtctttaccgtcgtccaggataccgttgatcgcaggtacgtcaaccggggatggcaggtaatcaattaccgcatccagcatcgcctgaacacctttgttcttgaacgcagaaccacaggttaccaggatgatttcgttgttcagaacgcgctgacgcagagcacctttgatttctgcttcagtcagttcttcaccacccaggtatttttccatcagctcttcagaagcttcagctgcggattcgatcaggttctggtgccattcgttagccagttcaaccatgtctgccgggatatcttcgtattcgaaggttacgccctggtcagcgtcgttccagttgatagctttcattttcaccaggtcaacaacaccggtgaaatgttcttcagcaccaatcgccagctgcagcggaaccgggttcgcgcccagacgggttttgatctggttaacaactttcaggaagttcgcacccatgcggtccattttgttaacgaacgcaatgcgcggaactttatatttgtttgcctgacgccatacggtttcagactgcggctgaacaccaccaactgcgcagtaaaccattaccgcaccatcgagaacacgcatggaacgttctacttcgattgtgaagtcaacgtgccccggggtgtcgatgatgttgatgcgatgcggctcatactgcttagccataccagaccagaatgcagtagtcgcagcggaagtgatggtaataccacgttcctgctcctgctccatccagtccatggttgcagcgccgtcatgaacttcaccgattttatggtttacaccggtgtagaacagaatacgttcggtagtagtggttttaccggcgtcgatgtgcgcactgataccgatgttacggtagcgtgcgatgggtgttgtacgagccatttgtttcctcgtttatcttttaggcgttcaatttaagtagcccaaagcgggctgcttactggaagcgcccgcctggtgactaaaactccgaagggataaccaacggtagtgtgcgaacgccttgttggcttcggccatacggtgaacgtcttcacgtttcttaactgcagtacctttgttttctgcagcatcagaaagttcgttcgccaggcgcagagccatggatttatcaccgcgtttacgagcagcttcaacgatccaacgcattgccagagcattacgacgaaccggacggacttcaactggtacctgataagtagaaccaccaacgcggcgagacttaacttctacagtcgggcgcacgttttcgagagctacttcgaatgcttccagttcagatttaccagagcgctgagccagggtctccagcgcgctgtatacgatagattcagcagtagattttttaccatctaccatcaggatatttacaaatttagccagcagttctgatccgaacttcggatccggcagaattttacgctgaccaatgacgcgacgacgtggcatggaaatactccgttgttaattcaggattgtccaaaactctacgagtttagtttgacatttaagttaaaacgtttggccttacttaacggagaaccattaagccttaggacgcttcacgccatacttggaacgagcctgcttacggtctttaacgccggagcagtcaagcgcaccacgtacggtgtggtaacgaacacccgggaggtctttaacacgaccgccacggatcaggatcacggagtgctcctgcaggttgtgaccttcaccaccgatgtaggaagtcacttcgaaaccgttagtcagacgaacacggcatactttacgcagcgcggagttcggttttttaggagtggtagtatatacacgagtacatacgccacgtttttgcgggcatgcttccagcgcaggcacgttgcttttcgcaactttgcgagcacgtggtttgcgtaccagctggttaactgttgccattaaatagctcctggttttagcttttgcttcgtaaacacgtaataaaacgtcctcacacaatatgaggacgccgaattttagggcgatgccgaaaaggtgtcaagaaatatacaacgatcccgccatcaccaggccatctggctggggtgcttaaccgtaagtctgacgaaatcagtatagtcaatgagaatgatgtcgttcgaaatttgaccagtcaaaccgcgggcaataaggtcttcgttcagggcatagaccttaatgggggcattacgcagactttcaaggtagcggttaccgtcaactgcggcagttacgccatcttgcaataatagcagttcgtctccttcactgagcagacgcagcagcgcagcaaaatccgtcagccagggtgagcgatgtaatgtgtgcagcataaacgcctcaaaacctcaaaataacatcgtagttggcgagttcgcggcgtaaggcatctgcttcgagcggcgtggcttcgacaacaaagggtgtctgcggatctaacccgcgttcgcgcagtgaagccgcacaaacccagcactgttcaatgtcgtacagacccaacaatttaaaagtggcaatgtaatcacgcgccagcactgcatcgggcttttgtcctggcagcagctgaaaaacgccatcagctataaagaagacagccagatcgtcagttaatgcggaagttgccagtaaagcatctaaaccttcccggcctgcggctgtaccatgaggtgcagtagaaaaaacaaacgcaattcgtttcatcagaactgtaccaccctgtcacaggtcagcgaggcttccgccagcgccccaagtccgcttaaggtaaatccctgctgaaggtttgacgaagccagccccagtcttccggcctccgtttcatcaacaacgccacggcgtaatgctgccgctacgcagatattcagcgccacaccatgttgcgcattcagttgttgccaggcccgtacgaggtcaaattcgtcacttgccggagaggtcaattggttagcgttatagaccccttcccgatagaaaaagacgctgcttaactcatggccatctgctatcagcgcctgcgcaaactgaaaagcactactcgcctgttgcgtaccgtatgctggcccggtcaccacgatggcaaaacgcattacttatcttgcccctggaaatcaccgctcttgaactggcggatgtagagatagacagtgtgtttggagatgttcaggcggtcagcaacctggttgatcgcatctttaatatcgaagatccctttctcgtagagattcagcacgatctgacgatttttggcgttattagaaacattgcgatcggcattcacttcttcgatggtgaactccagcgtttgggtaaccagatcttcaacagaagaggcaaagttgacgcttgaaccgacatccggggtttctggcggcacaaaggtgctcataatctgcgagaagggaacatcaagattcatattgatgcacagcagaccaattacacgctgttcgcggttacgaatcgcgatagtcagggacttcattaatacgccgcttttggcgcgagtaaagtagcatttagaaacgctgctatccgctcccgtcatatcgtgcagcatacgtagcgccaggtcagtaattggcgaaccaatcttccggcctgtatgttcaccgttagcaatgcgaatggctgaacattttagatcctgcaaagagtgcaaaacgatttcacagtgggagccaataagcatcgctaacccgtccaccaccgcttcgtaggatttcagaatatcaaaatcggtctggtcgaaaggacgttgatccagtaaatccaactcactggtttcgttggttaaaagcgacctggacatgaaaaaaaacactccttttcaggagcctgtcgttaacttttcagggcaggctcattaatgatgcgggtaactaaattaatacagcggaggttccgctttccagcactaattatatccggcctgtaataaaaaaaccgccgcctggtcaggcggcggttcttaatgcttattttttagcagaatctgcggctttcgcatcagcttccggctttgcatcagccttcggcgctggtttcacatccagcagctctacgtcaaacaccagggtagaattcggtgggatccccggaacacccgctttgccgtaagccagttctggtggaataaccagtttgatcttaccgcctttcttgatgttcttcagaccttctgtccaacccgggataacaccgtccagacggaaagaaagcggttcaccacgggtgtaagagttgtcgaactctttaccgtcgatcagcgtacctttgtagttcactacaacagtatcgctgtctttcggtgcttcgcctttaccggcttctactacctgataaaccagaccagttgaagaggttttcacacctttctctttggcaaatttctcgcggtactctttaccttttgcttcgttatcagccgcgtctttttccatcttcgcctgagcagaagacttcacgcgagcttcgaatgcttgtagagtctgttcgatctcttggtcggagagtttgctcttatcagcaaatgcatcctgaacaccagcgatcagctgatctttatccagtttgatgcccagtttttcttgttcttttagagagttttccatgtaacgacccagcgaggcacccagtgcataagctgatttctgatcgtcatttttgaacgctgctttgctgtcagcagctgtagcaggttttgcagcttcagcagcaaaagtgattggtgcatgcagggcaacggccattgtggtcgccagcagcgttactttaaacagtgatttcatccatatctccaggatcggggcatctcaccccagggttaactattatcagaagggtactataaagcgttgtcgaacaaatctacatacagacacgccctattatcatctattttcagactctttttgtttaaattagtttcgatgaccgcgaaatgagtgctgtctcgggcagcaaagttaagtagaatccgcggcgaccattcgacaaaagaggtgaatcatgcaggatttatcattggaagcacgcctggcagagctggagagccgactggcttttcaggaaatcaccattgaagaactgaacgtcacggtgaccgctcatgaaatggagatggcgaaactgcgcgatcatctgcgtctgctgaccgagaagttaaaagccagccagccgtcgaacatcgcgtcgcaggctgaagaaacgccaccgccacattattgaggcgtaaaaaaagcggggattccccgcttttttgtcactttttcggtattagtggcaaccgcaaccgccgttgcctttaccgccacagcagccttcgccaccgtgttcatgaccgtgatcgtggccatgaccgccgcagcaaccgtcgtggtcgtgatcgtggtggtgatcgtgcgcgccgtgaacgtgaccatgagccagttcttcttcagtcgcttcgcgaatcgccacaacttcaacgttgaatttcaggttctgaccggccagcatgtggttaccatcaaccacgacgtgatcgtcttcaaccgcagtgatttcaaccggtaccggaccctggtcggtttcagccaggaaacgcatacctacctgcagttcatcaacgcccataaatacgtctttaggaacacgttgcaccaggttttcgtcgtactgaccgtaagcgtcgttcgcgccaacagcgacatcaaatttgtcgccaacttcatgaccttccagcgccgtttccaggccagagatcagggaaccgtgaccatgcaggtagtccagcggcgcactcaccggagactcatcaaccaacacaccgtcttctgtacgtacctgataggccaggctgaccaccaggtcttttgctactttcatgatatctcctgagcatgggaagaatagtggcgcagattgtagcggaattctgcagccgtgtactcactagcttaaaaaaactcggcgcatatcgctagtccggatgaaaaatcccgatcacttgctcatctttgcgaacgtgatcgcgggcttctttgtctgcttctcgcatctgatgtccgcacttaacacattcaacaatatcaatattattttcgcgccacatcgccattgaatcctgcgcctgacaggccgggcattttgcgcccgcaataaaacgttttcggattgccatctttaccctctactcaaattcatcccagccgtccagctggcgtcgttcttgttgcatttcacgctggaaaatctcttccagttcgcgtcgggcttccctggcgcgagaaatttgtacggtatcggcatgcattgggatgagctctcgcagcatccgcatatccaggcggcgaaaatgcagttgcgctcgctgtgcctgatgcggatgcatgccaagcgtgaccagcgtcttgcgccccagctctaacgcactggagaatgtttcacgggaaaactgcgtcacccctgcctgtaataactcatgcgcttccacacgtccgcgcgctcgcgcaagaatatgcaaatgcggaaagtgctgttggcatatttccaccagcttcatggtgtcttccggctcgttacaggtaatgacgatagactcagcggcctctgcacccgcagaacgtaaaagatcgacctgcgtggcgtcgccgtaataaactttgtagccgtatttacgcatcaggttaacggcgctgatatcccgctccagcacggtaatgcgcattttatttgccatcagcaaacgaccaatcacctgaccaaaacgcccgaagcccacgacaatgacctggggtttatcatcgttgacccacggtttttcgtcttcttcttccggtccgttaaactggcgggatagccatttatccaccagcttcatcagcaacggcgtggtcatcatggaaagcgtcaccgtcaccagcaacaacgccatctggtcgccctggaataagcgttgtgaagaagcggtagaaaagaggacaaaggcaaactcaccaccctgactcaacacgccagcaaactgcatccgctctgagctacgcacgccatacaatcgcgccagcagatacagcacgagaattttcaccgccaccagcacaaccacgcttatcactacccacaacagatgggtataaagcaccccgaggttgagtgacatgccgacagagataaagaacaaaccgagcagcaagcctttgaagggatcgatagccgtttccagttcatggcgatattcactttccgccagcagcacgcccgcaataaatgtaccgagcgccatcgacagccccagcgcatccataaacaatgcggaacccaacaccagcagcagcgtcgcggcggtgaacacttcccgcacgccagaagctgcaataaagcggaataccggacgcagtaaatagcgcccaccaatcagcatgccgacaaacgccagcaccttcatgccgaccttcatccagtcgaaatgttcgtctgccgaccccgccaacaacggcactaacgccagtgctgggattactgccagatcctgaaacagcagaaccgaaaacccgagctggccggattcgctgcgattcatccctttctcacgcatcaattgcaacgccattgcagttgaagacatcgcaaggccaatgccaccgaccaccgccgcctgccaggcgaaatccgtcagcatcaataatcccgccagcaacgccgcgcttaacagcacctgtgccgcgcctacgccaaaaatcgaacgccgcagttgccaaagtttggagggattcaactcaaggccgatgataaacatcaggaataccacgccgagttccgaaaagtggaggatctcatcgacgtcgctaataaaccccagcccccacgggccaattgcaatccctgccagcaaatatcccaacacagcgccaatacccagccgcgatgccagcggcaccgcagccaccgccgcgaagagaaacagcactcctgcgagtaaaaaatcggaaccttccatcagcggcctcctggagacagcggatttgccagccagtcaccgtaggctctggcgtggctcgccagctcctgtgcgctttgccgtctcgcccagtaaataatgatgggacttaaccaatgcatccggcacatgcccgccgccagttcaaaggggcgcagcacatcgctcatcgggtagcgattcagcgcgtcataacggtaagcactttccggctcgccggtggtaatcacgctacgccagtactttcccgccagttggtttcctcccggcccgctggcaaaaccacgacttaatacccggtccagccactctttcagtagcgccgggcagctataggtataaagaggatgctgaaagacaatcacctcgtgctcgcgcagtaatgcctgctcacgggggatatcaataaaaaaatcgggatagtgcgcgtaaaggtcgtgcacggtaacattgctgagctgcgtggccggtttaagcagtacccggtttgccaccgagtcctgagattccggatgggcatacagcagcaaaactttcgctggctgagacatcatccccctcccggtatggtttttgtgtatagtcgctgttttgggctaccattgcgcccggtgcggcagctcgcccatacattacattatcataatgataagttaacatagtctgaacatacggcaccttatgattgttttctcctcgttacaaattcgtcgcggcgtgcgcgtcctgctggataatgccaccgccaccatcaaccctgggcagaaagtcggcctggtgggtaaaaacggctgtggtaaatctaccctgctggcattgctgaaaaatgaaatcagcgccgacggcggcagctacacctttccgggaagctggcaactggcgtgggtgaatcaggaaacgccggcgttaccgcaagcggcgctggaatatgtcattgacggcgaccgtgaatatcgtcaactagaagcgcagctacacgacgccaacgaacgtaacgacgggcacgccattgcgaccattcatggcaagctggatgctattgacgcatggagtattcgctcccgtgctgccagcctgctgcacggcctcggtttcagcaatgaacaactggagcgcccggtaagtgatttttccgggggctggcgtatgcgtcttaaccttgcccaggcgctgatttgccgttcagacttgctgctgctcgacgaaccgactaaccacctcgatctcgatgccgttatctggctggaaaaatggctgaagagctatcagggcacgctgatcctgatctctcacgaccgcgacttcctcgatccgatcgtcgataaaattattcatatcgaacaacaaagcatgttcgagtacaccggcaactacagttcgtttgaagtacagcgcgccacccgtctggcgcagcaacaagcgatgtacgaaagccagcaggaacgcgtagcgcatctgcaaagttatatcgaccgtttccgtgccaaagccaccaaagcgaagcaggcccagagccgcattaagatgctcgagcgtatggagctaattgcccccgcgcacgtcgacaacccgttccgctttagcttccgcgcgccggaaagcctgccaaatccgttactgaagatggaaaaagtcagcgcgggctatggcgatcgcattattctcgactcgattaaactgaacctggtgcccggctcgcgtattggtctgttaggccgcaatggcgcgggtaaatcgacattaatcaaactgttagccggtgaacttgcgccagtcagcggtgaaattggtctggcgaaagggatcaaactcggctacttcgcccagcatcaacttgaatacctgcgcgccgacgaatcacctattcaacatctggcacgtttagcgccgcaggagctggaacaaaaactgcgtgactacctcggcggctttggtttccagggcgataaagtaaccgaagaaacgcgccgcttctccggtggggaaaaagcccgcctggtgctggcattaattgtctggcagcggccgaatctgctgctgctcgacgaaccgactaaccaccttgacctcgacatgcgtcaggcactcaccgaagcattaatcgagtttgaaggcgcgctggttgtcgtttcgcacgaccgtcatttgctgcgttccaccactgacgatctctacctggttcacgatcgtaaagtcgaaccgttcgacggcgatctggaagattatcaacagtggttgagcgacgtacaaaagcaggaaaaccagaccgacgaagcgccaaaagagaatgcgaacagcgcccaggcacgtaaagatcagaagcgtcgggaagctgagctgcgtgcgcaaacccagccactgcgtaaagagattgcccgtctggaaaaagagatggagaagctgaacgcgcaactggcgcaggcggaagagaaactcggcgacagcgaactgtatgaccagagccgtaaagcggagttgaccgcctgcctgcaacagcaagccagcgccaaatccggcctggaagagtgcgaaatggcatggctggaagcccaggagcagcttgagcagatgctgctggaaggccaaagcaactgatggcgcagataacgacgaccgatgccaatgaattcagcagcagtgctgaattcatccccatgcgcggctttagcaattgtcatctgcaaaccatgctgccgcgtctgtttcgtcgtcaggtgaaattcaccccgtactggcagcggctggagttgcccgacggcgattttgtcgatcttgcgtggagtgaaaaccctgcacaggcgcaacataaacctcgtctggtggtgtttcacgggctggaaggcagtctcaacagcccttacgcccacggtctggttgaggcggcgcaaaagcgcggctggctgggcgtggtgatgcattttcgcggatgcagcggtgaaccaaaccgtatgcaccgcatttaccattcgggcgaaaccgaagacgccagttggtttttacgctggctgcaacgcgaatttggtcatgcgccaacggctgccgtcggctattcgctcggcggtaatatgctggcctgtttgctggcaaaggaaggcaatgatctcccggttgatgcggcggtgattgtctctgcgccgtttatgctggaagcctgtagctatcatatggaaaagggcttttcccgcgtttatcagcgttacttgctgaacctgttaaaagccaatgccgcgcgcaagctggcagcctaccccggaacgctgccgattaatctcgcgcagttaaaatcggtacgtcgcatccgtgaatttgacgatctcatcaccgccagaattcacggctacgccgacgctatcgactattatcgtcagtgtagcgccatgccgatgctgaaccggatcgccaaaccgacgctgattattcacgccaaagacgatccgtttatggatcatcaggtgatcccgaaaccggaaagtctccccccgcaggtggagtatcaactgactgaacatggcggtcatgttggctttattggcggtacattacttcatccgcaaatgtggctggagtcacgcattcctgactggttaacaacgtatctggaggcgaaatcatgttgattccgtggcaagacctctcccccgaaacgctggaaaatttaattgaaagctttgtgttacgtgaaggcaccgattatggtgaacatgagcgtacacttgaacagaaagtcgccgacgtcaaacgccagctacagtgcggagaagcggtgctggtatggtcggagctgcacgaaacggtcaatattatgccgcgcagtcagtttcgcgaataacctgcaaccgtcggcggacgagataataatgatagctaagtcatggagttactatgtctgccaaacatccggtcattgcggtaacaggatccagcggcgcggggaccaccaccaccagcctcgcgtttcgtaaaatattcgcgcagttaaatctgcatgcagctgaggtggaaggcgacagttttcaccgttacacccgcccggaaatggacatggcgatccgcaaagcgcgcgacgccgggcggcatatcagctacttcggccccgaggctaacgacttcggcctgctggaacaaaccttcattgaatacggtcagagcggcaaagggaaatctcgcaaatatctgcatacctacgacgaagccgtaccgtggaatcaggtaccggggacattcaccccctggcaacctttaccggaacccactgatgtactgttttatgaaggtttacacggcggcgtagtcacgccacagcataacgttgcgcagcatgtggacttactggtcggcgtggtgcctatcgttaaccttgagtggattcaaaaactgatccgcgacaccagcgagcgcgggcactcacgagaagcagtgatggactcagtagtgcgttcaatggaagactatatcaactacatcacaccgcagttttcccgcacccatcttaacttccagcgcgttcccaccgtcgacacttcaaacccgttcgcggcaaaaggtatcccgtcgctcgatgaaagctttgtggtgatccattttcgtaatctggaagggatcgatttcccctggctgctggcgatgttgcaaggctcattcatttcccacatcaatacgttagtggtaccgggcggcaaaatgggtctggcaatggaattaattatgctgccgctggtgcaacgattgatggaaggaaagaaaatcgagtaactctgctattacgccggataaaatactatccggcttcacaacgggatagttaagtcacgcggcaaccacttcatacgagtgagtaatattcaccgctttttccagcatcaacgccactgaacaatatttctcggcagagagatcaaccgcacgcgcaaccgctgcgtctttcaggtcgcgaccggtgacgataaaatgcagattaatgtgcgtaaacaggcgtggtgcctcttcgcggcgttcagaggtcaattttacttcacaatcgaccacatcctgacgccctttttgcaggatcgaaaccacatcgatggcactgcaaccacccgccgccatcaacaccatttccatcggacttggtgctttatcgcctgagttgccgtccattaaaatctgatgaccagaggcggattcgcccagaaaagttaacccttcgacccacttcactcgcgcttgcatttttgctactccactgcgtcaattttcctgacagagtacgcgtactaaccaaatcgcgcaacggaaggcgacctgggtcatgctgaagcgagacaccaggagacacaaagcgaaagctatgctaaaacagtcaggatgctacagtaatacattgatgtactgcatgtatgcaaaggacgtcacattaccgtgcagtacagttgatagccccttcccaggtagcgggaagcatatttcggcaatccagagacagcggcgttatctggctctggagaaagcttataacagaggataaccgcgcatggtgcttggcaaaccgcaaacagacccgactctcgaatggttcttgtctcattgccacattcataagtacccatccaagagcacgcttattcaccagggtgaaaaagcggaaacgctgtactacatcgttaaaggctctgtggcagtgctgatcaaagacgaagagggtaaagaaatgatcctctcctatctgaatcagggtgattttattggcgaactgggcctgtttgaagagggccaggaacgtagcgcatgggtacgtgcgaaaaccgcctgtgaagtggctgaaatttcgtacaaaaaatttcgccaattgattcaggtaaacccggacattctgatgcgtttgtctgcacagatggcgcgtcgtctgcaagtcacttcagagaaagtgggcaacctggcgttcctcgacgtgacgggccgcattgcacagactctgctgaatctggcaaaacaaccagacgctatgactcacccggacggtatgcaaatcaaaattacccgtcaggaaattggtcagattgtcggctgttctcgtgaaaccgtgggacgcattctgaagatgctggaagatcagaacctgatctccgcacacggtaaaaccatcgtcgtttacggcactcgttaatcccgtcggagtggcgcgttacctggtagcgcgccattttgtttcccccgatgtggcgcagactgatttatcaccccgatatcaactatgcacttcgacaaacgctggtgctatgtttgcccgtggccgttgggttaatgcttggcgaattacgattcggtctgctcttctccctcgttcctgcctgttgcaatattgcgggccttgatacgcctcataaacgttttttcaaacgcttaatcattggtgcgtcgctgtttgccacctgtagcttgctgacacagctactactggcaaaagatgttcccctgccctttttgctgaccggattaacgctggtacttggcgtcactgctgagctggggccattgcacgcaaaattgcttcctgcatcgctgctcgccgccatttttaccctcagtttggcgggatacatgccggtctgggaaccgttgctcatctatgcgttgggcactctctggtacggattgtttaactggttttggttctggatctggcgcgaacaaccgctgcgcgagtcactaagtctgctgtaccgtgaactggcagattattgtgaagccaaatacagcctgcttacccagcacaccgaccctgaaaaagcgctgccgccgctgctggtgcgccagcaaaaagcggtcgatctaattacccagtgctatcagcaaatgcatatgctttccgcgcaaaataatactgactacaagcggatgctgcgtattttccaggaggcgctggatttacaggaacatatttcggtcagtttgcatcagccggaagaggtgcaaaagctggtcgagcgtagccatgcggaagaagttatccgctggaatgcgcaaaccgtcgccgctcgcctgcgcgtgctggctgatgacattctttaccatcgcctgccaacgcgttttacgatggaaaagcaaattggcgcactggaaaaaatcgcccgccagcatccggataatccggttgggcaattctgctactggcatttcagccgcatcgcccgcgtgctgcgcacccaaaaaccgctctatgcccgtgacttactggccgataaacagcggcgaatgccattacttccggcgctgaaaagttatctgtcactaaagtctccggcgctacgcaatgccggacgactcagtgtgatgttaagcgttgccagcctgatgggcaccgcgctgcatctgccgaagtcgtactggatcctgatgacggtattgctggtgacacaaaatggctatggcgcaacccgtctgaggattgtgaatcgctccgtgggaaccgtggtcgggttaatcattgcgggcgtggcgctgcactttaaaattcccgaaggttacaccctgacgttgatgctgattaccaccctcgccagctacctgatattgcgcaaaaactacggctgggcgacggtcggttttactattaccgcagtgtataccctgcaactattgtggttgaacggcgagcaatacatccttccgcgtcttatcgataccattattggttgtttaattgctttcggcggtactgtctggctgtggccgcagtggcagagcgggttattgcgtaaaaacgcccatgatgctttagaagcctatcaggaagcgattcgcttgattcttagcgaggatccgcaacctacgccactggcctggcagcgaatgcgggtaaatcaggcacataacactctgtataactcattgaatcaggcgatgcaggaaccggcgtttaacagccattatctggcagatatgaaactgtgggtaacgcacagccagtttattgttgagcatattaatgccatgaccacgctggcgcgggaacaccgggcattgccacctgaactggcacaagagtatttacagtcttgtgaaatcgccattcagcgttgtcagcagcgactggagtatgacgaaccgggtagttctggcgatgccaatatcatggatgcgccggagatgcagccgcacgaaggcgcggcaggtacgctggagcagcatttacagcgggttattggtcatctgaacaccatgcacaccatttcgtcgatggcatggcgtcagcgaccgcatcacgggatttggctgagtcgcaagttgcgggattcgaaggcgtaatgcaggctaaaccatcggataaggcattcacgccgcatccgacatcttttgcctgatgcttcgtatttacgccccaaccaccttcgccaccgcgtgggcgaaacgttgcatcccttcatcgatatccgcatcttccaccaccagcgacggtgcaaaacgcatcacatccggtccggcattcagcaccattacgccagcctctgcgcccgcatacaggaaatcacgcgcccgacctttgtactgtggtttcagctctgcgccaatcaacagccccataccgcgaatatcgctaaatacatcgtactgctgatcgatcttctgcagatggtcaacaaaacgctggcgtttcgcctgaatgccttccagcacttcaggggtattgatgatatcaaacgccgcccccgctactgcacaggccagaggattaccgccgtaggtggaaccgtgagaaccaggatgaaacgcagaagcaatttccgccgtggtcagcatggcgctaatcgggaagccgccgcctaacgctttcgcagaggtcagaatatccggcgtaacgccgtagtgcatgtaagcaaacaaatcgccggtccgccccatcccgcactgcacttcatcaaacaccaataatgcctgatgttgatcgcacagctcgcgcaagccctgcaaaaactctggcgtcgctgccgtcacaccgccctcgccctggatcggctcaaccaccaccgcacaggtgtgatcatccatcaccgctttcactgcatggagatcgttaaagggaacgtggatgatgtctgccggtttcggcccaaagccgtcggaatattttggctgcccacccaccgaaacggtaaacagcgagcgaccatgaaaagcgttatggaaggcaataattttggttttgaacgggctatgacgcacacaggcgtaatggcgtgccagtttaaaggcggtttcgttagcttccgtgccggagttcataaacaccacgcgttcggcaaacgttgcctcaatcagtttacgcccaagacgcagcgccggttcattggtgaaaacgttactgatatgccacagagtttcgccctgggtttttaacgcgttcaccagcgcaggatggcaatggcccaacgccgtaactgcaatgccacccgcgaaatcgacatactccttgccttgctgatcccagattcggctgccctgaccttttaccggaataaactctgccggagcataaatcggcaggatcacttcatcgaaagtcgcgcgtgtaattgctgtttgttcaattgccatctcatgatcaccctgttacgcataaacaaatgtgaaattataaccacaaaatatgcataaaaaatcactaaatggcaatcagaaatcagcgatgcaggaaattagccagcagttgatgtccttgttcgctaagaatactttctggatggaactgcacaccttccagatcccactggcgatggcgaatccccataatctctcgggtttcgctccaggccgtcacgtcaaagcacgctggtaatgagtcaggttccaccaccagcgaatggtagcgtgtcacggtaagtggatttgccagcccccgaaatacgccctcaccgttatgtgtaatcggcgaggttttgccgtgcatgacctttgcggcgcgcacaactttaccgccaaatgcctgcgccattgcctgatgaccgaggcagacgccaagaatcggcaagcgcccggcatagtggcgaataacgtcaagggagatcccggcttcatctggcgtacaggggccaggtgagatgacaattttttgtggtttaagggcgtcgatatccgccagcgtcaacgcatcgttgcgcttaaccagcacatccgcccccagttcacaaaagtactggtagaggttccaggtaaaagaatcgtagttatctataagcaggatcatggcggctccggtacaaaagaaccgcgctattttactcagattccccggcttcgcttaccactttgctaaatatcatctgcagtgcggtgagatcccccattgccccactctgatttgcctgattccaggcctctttttcgataccctgccagctcagttgatatccggcatgaatcgccagttgctcgaagaagatccgctgtgccagaccacttcccacccggaagggatgcagcacgttgatttcacaatagtaatgcgccagccgctcgacgaacttcgctttctccaggccaaccagataaccttcttcctccagatcctgcatcagggcattgccctctttttcgatataagcaaagtggcagaacggcgtatcaccctgataaatatcaacttcacgcagttgccctgcccagtcgaaaatatcctgatacagctggcgatggatagttcgcaaatgcggtaaaccgcgcaccagcggaccaagctcaatggtcgcagcacgcagcgccgtcatttcgtaagcggcctgttccagccgctgctgctggcggatgttcagccggttacgcatgatatcaaggcctggataaagatacggatcgcgcccttcgccgaatttatcgctcatagtgactcctcagctcttcaaggcgcgctaaagcctctgcggcagtaagagtgactaaaggcatctcgacgccttcaagacggcgactggcctgaaaattacgattacgctgaagctcccagagacgggacttttgcttatcggtgagtttcttcacttgatgcctccctgaacgtgtccatttgccacaagtataagcggcaaatccgggttacgccgggagagcagaagcgcgggcaagattgcccgcgcgagaaatcattacggcaggactttagcggaaaggataactaccggttttgacggcacattctggtacggaccaacgtcatgagtcggcacctgggaaatcttatcggcaacgtccatgcctttcaccactttaccaaataccgcgtaaccgaaatcacgctgaccatggtcaaggaaggcgttatcggcaacgttgataaagaactggctggtggcgctgtctttgtcagcggtacgtgccatcgcgatggtgccacgcgtgttgcgcaggccgttatcggcttcatttttgattggcgggtttggttttttctgctgcatctgctcggtgaaaccgccgccctgaatcataaagccaggaatgacgcggtgaaaggtagtgttgttataaaaaccgctgttcacataatcgacaaagttttgcacagacactggcgctttttgtttatccagctccagttcgatgttaccagctgaggttgtcaacaatacgtgcgggtcccctttcgctgccattgctgcgggagaaagagcagaaagagcgaaaacagcagccatcgccgccagggtcgatttgaacatgagatttccttaacaaacagagcagaaaaaaagcaagtgaagagattctaaatagccttcaagaacaaggccatccctttacctaattttacgtatctgaaatatatgtaacctgacgatcactttttattccgtgatcaaaatcacctcttaaaatgcaatttagcaaccgattgcaataaaacatttaaacagatcacaaaatcacctaaaatcgcccgctcgcggcatatcccgctatgccattttatttttgaacgcaggccaatcatgactaacagcaatcgcatcaagctcacatggattagctttctctcctacgcactgactggtgcgttggttattgtcaccgggatggtgatgggaaatatcgccgattatttcaatctgcctgtttccagtatgagtaataccttcaccttcctcaacgccggcattttaatctctatcttcctcaacgcctggctgatggaaatcgtcccgttgaaaacgcagttacgttttggctttctcctgatggtgctggcggttgccggtttgatgttcagccacagcctggcgctgttctcggcggcgatgttcattctcggggtggtcagcggcatcaccatgtcgattggtacattcctggtaacacaaatgtatgaagggcgtcagcgcggttcccgcctgttatttaccgactccttcttcagtatggctgggatgattttcccaatgatcgccgcgtttctactggcgcgcagcattgagtggtactgggtttatgcctgcatcgggctggtgtatgtcgctatttttattctgaccttcggctgtgagttcccggcgctgggcaaacatgcgccaaaaacggatgctccggtagagaaagaaaagtgggggatcggcgtactgtttctctctgttgcggcgttgtgctacatcctcggtcagttaggttttatctcctgggtgcctgagtatgccaaaggcctgggcatgagcctgaacgacgcgggcacgctggtgagtaacttctggatgtcatacatggtcggcatgtgggcgttcagctttattcttcgcttctttgatttgcaacgcattctgaccgtactggctggtctggctgcgattctgatgtacgtctttaacaccggaacaccagcacatatggcgtggtcaattctcgctctgggcttcttctccagcgcgatctataccaccatcatcaccctgggttcacagcagaccaaagtaccgtcgccaaaactggttaactttgtcctgacctgcggaaccatcggtactatgttgacctttgtggttaccggcccgatcgttgaacatagcggtccgcaggcggcactgcttacagcaaacggtctgtacgctgtcgtctttgtgatgtgcttcctgttaggtttcgtcagccgtcaccgtcagcataacaccctgacctctcattaattgctcatgccggacggcactatcgtcgtccggccttttcctctcttcccccgctacgtgcatctatttctataaacccgctcattttgtctattttttgcacaaacatgaaatatcagacaattccgtgacttaagaaaatttatacaaatcagcaatatacccattaaggagtatataaaggtgaatttgatttacatcaataagcggggttgctgaatcgttaaggtaggcggtaatagaaaagaaatcgaggcaaaaatgagcaaagtcagactcgcaattatcggtaacggtatggtcggccatcgctttatcgaagatcttcttgataaatctgatgcggccaactttgatattaccgttttctgtgaagaaccgcgcatcgcttatgaccgcgtacacctctcgtcttacttctctcaccacaccgccgaagagctgtcgctggtgcgcgaaggcttctacgagaaacacggcatcaaagttctggtcggcgaacgcgctatcaccatcaaccgtcaggagaaggtgattcactccagcgccggacgtaccgttttttatgacaagctgatcatggcaaccggttcctacccgtggatcccgccaatcaaaggttctgatactcaggactgctttgtctatcgcactattgaagacctcaacgccattgaatcctgcgcccgtcgcagcaaacgcggtgccgttgttggtggcggcctgttaggtctggaagccgcaggcgcgctgaaaaacttaggtattgaaacccacgttatcgaatttgcccctatgctgatggcagaacagcttgatcagatgggcggcgagcagctgcgtcgcaaaatcgaaagtatgggcgtgcgcgttcacaccagcaaaaacacccttgagattgtgcaggaaggtgttgaagcgcgtaaaaccatgcgttttgccgacggcagcgaactggaagtcgactttatcgtcttctctaccggtatccgtccgcgcgataagctggcaacccagtgtggtctggacgttgctccgcgtgggggtattgtcattaatgattcctgccagacttccgatccggatatctacgccatcggtgaatgcgcaagctggaacaaccgtgtatttggtctggtagcacctggctacaaaatggcgcaggtcgccgttgaccatattctcggtagcgaaaacgcctttgaaggtgctgaccttagcgccaagctgaaactgctgggcgtagacgtaggcggtattggtgatgcgcacggtcgcacgcctggcgcacgtagctacgtttacctcgacgaaagtaaagagatctacaaacgcctgattgtcagcgaagacaacaaaaccctgctcggtgcggtactggtgggcgataccagcgactacggtaacctgctgcaactggtgctgaacgctatcgaactgccggaaaacccggattccctgatcctgccagcacactcgggtagcggcaagccgtctatcggtgttgataaactgccggacagcgcgcaaatctgctcctgcttcgacgtcaccaaaggtgatctgattgctgccatcaacaaaggctgccacacagttgcggcgctgaaagctgaaaccaaagcgggtactggctgcggtggctgtatcccgctggtcactcaggtactgaacgcggaactggcgaaacagggcatcgaagttaacaacaacctgtgcgaacactttgcttattcgcgtcaggaactgttccatttgatccgcgttgaaggcattaaaaccttcgaagaactgctggcgaaacacggcaaaggctacggttgtgaagtttgtaaaccaaccgtcggttcgctgctggcctcctgctggaacgaatacattctgaagccggaacatactccgctgcaggattctaacgacaacttcctcgctaacatccagaaagacggcacctactcggtgatcccgcgttctccgggcggtgaaatcaccccggaagggctgatggcggtaggtcgtatcgcgcgtgaatttaatctctacaccaagatcactggctcccagcgtctggcgatgtttggcgcacagaaagacgatctgccggagatctggcgtcagctgattgaagccggcttcgaaaccggtcatgcctatgcgaaagcactgcgtatggcgaaaacctgcgtgggtagcacctggtgccgctacggcgttggcgacagcgtcggcctcggcgtggaactggaaaaccgctacaaaggcatccgtacgccgcacaaaatgaagttcggtgtctccggctgtacccgtgaatgttcagaagctcagggtaaagacgtgggtattatcgccactgaaaaaggctggaacctgtatgtttgcggtaacggcggcatgaaaccgcgtcatgcggatctgctggcggcggatatcgatcgcgaaacgctgatcaaatatctcgaccgcttcatgatgttctacatccgtactgccgacaaactgacgcgtaccgcaccgtggttagaaaacctcgaaggcggcatcgattacctgaaagcagtgatcattgacgacaaactggggctgaacgcacatctggaagaagagatggcgcgcctgcgtgaagcggtactgtgtgagtggactgaaacggtcaatacgccgtctgcgcagactcgcttcaaacacttcatcaacagcgacaagcgtgacccgaacgtgcagatggtgccagagcgcgaacagcaccgtccggcaacgccgtatgaacgtatcccagtaactctggtggaggacaacgcatgagccagtggaaagacatctgcaaaatcgatgacatcctgcctgaaaccggcgtctgcgcgctgttaggtgacgagcaggtcgcgattttccgcccgtatcacagcgatcaggtgtttgcgatcagcaacatcgacccgttcttcgagtccagcgtgctgtcacgcggactgattgcggaacaccagggcgagctgtgggtcgccagcccgctgaaaaaacagcgttttcgcttaagcgacggcttgtgcatggaagacgaacagttttccgtcaaacattacgaagcgcgagtgaaagacggcgtggtgcagctgcgcggttaatgttttaacgggaggcgcaatgcctcccctttttgcatggtcctgtaataatcttcggtatattgcaggacattttttaaactttttgttttattttttgtttttattttttaaaggataatcaaatgtttacagacactattaataagtgtgcggctaacgctgcgcgcattgcacgcctgtcggcaaataacccgctcggcttttgggtcagctccgccatggcgggcgcgtatgtgggtcttgggatcatcctgattttcacgctcggtaatttgctcgatccatccgtacgccctttggtgatgggcgcgacctttggtatcgccttaacgctggtgattatcgccggttctgaactgttcaccggacacaccatgttcctcacctttggggtaaaagcgggcagcatcagccacgggcaaatgtgggcaatcctgccgcaaacctggctgggtaacctggtcggttccgtcttcgttgccatgctctatagctggggcggcggtagcctgctgccggtagataccagcatcgttcactccgtcgcgctggctaaaaccactgcaccggcaatggtactcttcttcaaaggtgcattgtgtaactggctggtttgcctggcaatctggatggcgctgcgcactgaaggggcggcgaaatttatcgctatctggtggtgtctgctggcatttatcgcgtccggctacgagcactctatcgctaacatgacgctgttcgcgctctcctggttcggcaaccacagcgaagcctacacgctggcgggtattggtcataacctgctgtgggtgacgctgggtaatactttatcaggtgccgtattcatgggattgggttattggtatgctacgccgaaagcgaatcgtccggttgcggacaaatttaatcaaactgaaacggctgccggttaattactaaggggtttttacgtggatcatttgcctatattttgccaattacgcgatcgcgactgtctgattgtcggcggtggtgatgtcgcggaacgcaaagcaaggttgctgttagacgcaggcgctcgcttaacggtgaatgcattagcgtttattccacagttcaccgcatgggcagatgcaggcatgttaaccctcgtcgaagggccatttgatgaaagccttctcgacacctgctggctggcgattgcagcgacggatgatgacgcgcttaaccagcgcgtcagcgaagccgctgaagctcgtcgcatcttctgtaacgtggtcgatgcgccgaaagccgccagctttattatgccgtcgattattgaccgctcaccgctcatggtagcggtctcctctggcggcacctctccggttctggcacgcctgttgcgcgaaaaacttgaatcactgctgccgttacatctgggccaggtagcgaaatacgccgggcaattacgcgggcgagtgaaacaacagttcgccacgatgggtgagcgtcgccgtttctgggagaaattgttcgttaacgaccgcctggcgcagtcgctggcaaacaacgatcagaaagccattactgaaacgaccgaacagttaatcaacgaaccgctcgaccatcgcggtgaagtggtgctggttggtgcaggtccgggcgatgccgggctgctgacactgaaaggactgcaacaaattcagcaggcagatgtggtggtctacgaccgtctggtttctgacgatattatgaatctggtacgccgcgatgcggaccgtgttttcgtcggcaaacgcgcgggataccactgcgtaccccaggaagagattaaccagatcctgctgcgggaagcgcaaaaaggcaaacgcgtggtgcggctgaaaggtggcgatccgtttatttttggccgtggtggcgaagagctggaaacactgtgcaacgcgggtattccgttctcggtggttccgggtattaccgcagcttctggttgctctgcctattcgggtattccactcacgcatcgcgattatgcccagagcgtacgcttaattaccggacacttaaaaaccggtggcgagctggactgggaaaacctggcggcagaaaaacagacgctggtgttctatatggggttgaatcaggccgcgactattcagcaaaagctgattgaacacggaatgccaggcgaaatgccggtggcaattgtcgaaaacggtacggcagtcacgcagcgcgtgattgacggtacgctcacacagctgggagaactggcgcagcaaatgaacagtccatcgctaattattattggtcgggttgttggcctgcgcgataaactgaactggttctccaaccattaatttaacccgggccagagaattctggccttcttaatgactctttttatatattcagcaaataaaacatagccccttaataaatattatctgctaatgggttatattcaccgttacagcgacttacaaaattaagtcattcgctcactgacgccaattaaatattcctgtatcgttcttaacgagcagtctgcttatattcatataatcaatgaatattaattaatatataatacatagggaatgtaaatgaacaaatttattaaagttgcactggtaggtgcagtactggctacgttaactgcatgtactggtcatattgaaaaccgtgataagaactgctcttacgactacctgctgcacccggcaatttctatttctaaaatcattggcggttgcggtcctactgcacagtaagtctctgacagaaatcggctaacaccggtttaattgcccgacgccctctggattttccgagggcgtatttgtttctatgtccttcttgcccccgcccgtaaaaatattttcactttaaattcaatttgataactacatccattagccacagcgcgatcctgtgcgaaattttgtgatcttcctccacattacataacatcatatgttgttatattcatcatgcattgtcatgttaccttttaaatgactgcaaactctcccctacaacgtattggacaagaaaaaggtatcgctatgggaagccaggaactccaacgcaagctcggattttgggccgttcttgcaatcgccgtcgggacaaccgtcggctccggtatttttgtatctgtgggtgaagtggcaaaagcagcgggcacgccgtggcttacggtgctcgcgtttgtcattggcgggttaattgtgatcccgcaaatgtgcgtctatgcggaactatccaccgcttatccggaaaatggcgcagattatgtttatctgaaaaatgccggaagccgaccgctggctttcctctccggctgggccagcttctgggccaacgatgcgccgtcattgtcgattatggcgctggcgattgtcagcaatcttggctttttaacgcctatcgatccgttgctcggtaaatttatcgccgccggattaattatcgcctttatgttgctacacctgcgctccgttgaaggcggcgcagcgtttcagacgctaattaccatcgccaaaattatcccgttcactatcgtcattggccttgggatcttctggtttaaagcggagaattttgccgcccctaccaccactgcgattggcgcaacgggcagctttatggcgctgctggcggggatctctgccaccagttggtcgtataccggcatggcctctatctgttatatgaccggcgaaattaaaaaccccggaaaaaccatgccacgagcgctgattggttcctgtctgctggttctggtgctctacaccctgctggcgctggtgatttccggcctgatgcccttcgacaaactcgccaattctgaaacgccgatttccgacgccctgacctggatccccgcactcggcagcaccgctgggatctttgttgccatcacggcgatgatcgtcattcttggttcgctttccagctgcgtgatgtaccagccgcggctggaatacgcgatggcgaaagacaacctgttctttaaatgcttcggccatgtgcatccgaaatacaacacgccggatgtctccatcatcctgcaaggggcgctggggatcttcttcatcttcgtttccgatctcaccagcctgctgggttatttcaccctggtgatgtgtttcaaaaataccctcaccttcggctccatcatctggtgtcgtaaacgcgacgattacaaaccgctgtggcgtactccggctttcgggctgatgaccaccctcgccattgcgtcaagcctcattctggtcgcctcaacctttgtctgggcaccgattcccggccttatctgcgccgtcatcgttattgctactggtctgcctgcttacgccttctgggcgaagcgtagccgccagctcaacgctttgtcgtaatgttatctggagaaaataaaatgttggatattgataaaagcaccgtggactttctggtcaccgaaaatatggttcaggaagtggaaaaagttctcagccatgacgttccgctggtgcacgccatcgtggaagagatggtgaagcgcgacattgatcgtatttatttcgttgcctgcggatcgccactcaacgcggcgcaaacggcgaaacatctggcggatcgcttttccgatcttcaggtctacgccatttccggctgggagttctgcgataacaccccgtatcgcctcgacgatcgttgcgcagtaattggcgtttctgactacggtaaaaccgaagaggtaatcaaagcgctggagctgggccgggcctgcggcgcactcactgcggcgttcaccaaacgcgcggatagcccgattacctcggcggcggaatttagcattgattatcaggccgactgtatctgggaaattcacctgctgctctgctacagcgtggtgctggagatgatcacccgcctcgcgccgaacgcggaaatcggcaagatcaaaaacgatctcaagcagttgccgaatgcgctcggtcatctggtacgcacctgggaagaaaaaggccgccagcttggtgaactggccagccagtggccgatgatttataccgttgctgcgggtccgctgcgtccgctgggttacaaagaaggcattgtaacgctgatggaatttacctggacgcacggctgcgtgattgagagcggagagttccgccatggcccgctggagattgtcgaaccgggcgttccgttcctgttcctgctcggcaatgatgaaagtcgccacaccaccgaacgcgccattaactttgttaaacagcgtactgacaacgtgatcgtcatcgattacgccgaaatttcgcaagggctgcacccgtggctggcaccgttcctgatgttcgtgccaatggagtggctctgctactacctgtctatttacaaagatcacaacccggatgaacgccgctattacggtggtctggtggaatattaatccctctcccggcccggcaacgggccggatttacgcaaggagttacccgatgaaaacaggtatgtttacctgcggccaccagcggctgcctattgaacacgcatttcgtgatgcaagcgagctgggttacgacggcatcgaaatttggggcggtcgcccgcacgcgttcgcgccggacttaaaagcgggcggcatcaaacaaatcaaggcgctggcgcagacgtatcagatgccgattatcggctatacgccagaaaccaacggctatccgtataacatgatgctgggcgatgaacatatgcgtcgcgaaagcctcgacatgatcaagctggcgatggatatggcaaaagagatgaacgcgggttatacgctgatttccgccggcccacgcgggctatctcacgccacctaatgttatctggggacggctggcagagaacctaagcgaactgtgtgagtacgcggaaaacatcggcatggatctaatcctcgaaccgttaacgccgtatgaatcgaacgtcgtgtgtaatgctaatgatgtgcttcatgcgctggcgctggtgccttcgccgcgcctgttcagcatggtcgacatttgcgcgccgtatgtccaggcggaaccggtgatgagttatttcgacaaactgggcgataaattacgtcatctgcatattgtcgacagcgacggggccagcgacacgcattacattcctggagaaggcaaaatgccgctgcgggaactgatgcgcgatattattgagcggggctatgagggttactgtacggtggagctggtgacgatgtatatgaacgagcccagactctatgcccgccaggcgctggaacgctttcgcgcgctgctgccggaggatgagagatgaaaaccctggcgacaatcggcgataactgcgtcgatatctacccgcaactgaataaagcgttttctggcggtaatgcggtcaatgtggcggtgtactgcactcgctacggcatacagccgggatgcattacctgggtgggtgacgatgactacggcacaaagctgaagcaggatctcgcccgcatgggcgtcgatatcagccatgtccatacgaaacacggcgttaccgcacaaactcaggtggaactgcacgacaatgatcgcgtttttggcgactacaccgaaggcgtgatggccgactttgccctgagtgaagaggattacgcctggctggcgcagtatgacattgtgcacgcggcaatctggggacatgcggaagacgcattcccacagctgcacgctgcgggcaaacttaccgctttcgacttctccgacaagtgggacagcccgctctggcagacactggtgccgcatctcgattttgcctttgcctccgcaccgcaagaagacgaaacgctgcgtctgaagatgaaagcgattgttgcccgtggcgcaggaacagtgattgtcacgctgggtgaaaacggcagcattgcctgggatggcgcgcagttctggcgtcaggctcctgaaccggtgacggttatcgacaccatgggtgccggagattcgttcattgccggattcctttgcggctggtctgcggggatgacattaccgcaggcgatagcgcagggaacggcgtgcgcggcgaaaaccattcagtaccacggtgcctggtaggtataacgttggcgtgagcatcttcacgccaacgtgctgttacttgccggaaaacgaccctataatccgagtaattcattctttatttcagggtcgattatgtcagctacggaccgctactctcatcaactcctctacgctaccgtccgccagcgactgctggatgatatcgcgcagggggtttaccaggccgggcaacagatccctaccgaaaacgagctttgtacacaatataacgtcagccgcattaccattcgcaaagccatcagcgacttagtggcagacggcgtactgatccgctggcagggaaaaggcacctttgtacaaagccagaaagttgaaaacgccctgcttactgtcagtggttttaccgattttggcgtctcacaaggcaaggcgacgaaagagaaagtgatcgaacaggaacgggtcagcgccgcgccgttttgcgaaaagctgaacatccccggaaacagcgaagtgttccatctctgccgggtgatgtatctcgataaagagccgctgtttattgatagttcatggatcccgctgtcgcgttatcctgactttgatgagatttacgtcgaaggaagctccacctatcagttatttcaggagcgttttgacacgcgagtggtcagcgacaaaaagaccatcgatatctttgccgccacccgcccgcaggcaaaatggctgaaatgcgaactgggcgaaccgttgtttcgcatcagcaaaatcgcctttgatcagaatgacaaaccggtgcacgtctccgaactcttctgccgcgccaatcgcatcaccttaactattgataataaaagacattaaccgtaggccggataagatgcgccagcatcgcatccggcgatgctggcgcgttgaattttacatcccgtacgttcccctcaccctaaccctctccccaaaggggcgaggggaccgttcagtacggaatttagcttgacggtgctatccagcattaaatactggcaatactctcacgcaaaatccgcagcaccgtctcttcaccgctgcgattcgggttaatgcgaatcgcacaatgttctgattgtggattcgcctggcgaaacgttccggaaaggcgataaaagagcggcgggatttcatatttcgactctgcacccaccgggtaaggcaaggcaccgcgcttttgcgcctcttccagcactctggcggcaatcggctgatgaaactcgacaatcaacaccttcgactgcgcattagcaatcaccgcgcttttcacttccggcaccgcaccaccgttaagcaaagccagcaaccgttcagatacccctgcctgcaccgcgtgcatcactggcgcaaacaccagaccacgcaatacttccagcgcctgtgcgccctggatctggctaccgccggagtaaagcgtggcgcgaatacggttgataacatcagcatcgccgaccactgcaccaacaccctctggcccaaatagcttgaagcaggaaaatgtcgagacattcgcgccgcattcacagccgattcgagccaccttcatcaccgcatagttgtcatcggttaacgctggaacacctgccgcgcgcaacgttgccagcacatctgccagcacgtagctgtcctgcggctgctggcgcgtatgctgcaccagcgccgcatccggttgttgctcgtcgacgacctgcttcagtgccgacaggtcattgaaatcaacagtaataagcgtcagccccatctgctcaataataacccgtgtcgtcgggtaaacaggcgcgtcatgcaccagaagacgctgccccggtttgagcaaagccgccagcccggcgcgaatcgcgccagtccccgcgccctgcaccagcgccgcagcctgtgcgtgaaatgcatcagccagcacctgttccacacgctgggtaacgcgcggttgattcagtcctggcgttaagcctaaatcaccgccagtaagaaactcgctgccggggaaatggcgacaaatgctatccaccagcgcaaactgcttttgctgcgcctcaataatcgtcaggctttgcagaggaaacgtcttcataggtgccttccttaagccggaacgaacaggccaagccagtaaagaacattcagcagaataccggtgatcattactgccacgaccggtgccgccattttctgtaccggacggcccagggattcgttgaggaagtaaatggcaaccgcgatagagaatccggtataacccgccatcttaattgctgcgaaaatcgaaccgaccagcagcgccacttccatcagcatattcatggcgttacggatgttatccgacgcattacgcaccgacgggtagcgtcccagccatttgccgatcgaacgaagcagcaagacttccgccgaaataaccactgcgcctaataccgctgcaaccatcggattcggcgagagatagtccaccgcataaacaaaggtaaagcccgcaactgcatacacacccgttgctaacgcggtggtggcaatcaacggcacaaaccccagtccgcgcataaattctgccagagccgcctgattaatcagcgtttgcgattgttccggcgttacgcctgcggaatatgctttctccagtgtgaagatcgacacttcactgccagcaaaaatcttcatgctggcaacggcggcaatcaatgctcccacgatggcgatatagggtaagtttttgataatccgtgacgtgcgttcttcaaacaccgaaagcccgctggcatcaatgtcattttcatcacgatgacgcaggtcgtgagttatcgcgatccccagcagcatcaccatgccaataaagatttcgatggattcagggttaagatgtgggaaatagcgcacgactaccacacgggtcatcagtaccaccacggcggcgatcagactttgcttccagccaaactggtagaaaatcgccaccagcgggaacagtgcaaaagctgaaaccaccggcgagcttaattcccccaggctacctaatacatccaccggcagcgcggtcagcagctggtttactggcaacaggcaagtaaggatcaacacgccccagatagcgccaagaccaaacgccatcaggctgtttatcgccaggacgccgaggatatcggtaggaagaaagagtaaccatgcgttgagcagcccggttttcagggtaaaagagatccccaccgaggccacaaaaccaatgctcagaccaaaagcgatactccccgcctcgcgacggttcatatagccttcaatcagttgcggcaggatcgggcggatgccgtcatgaaaaacagccgccgagcgatgcgccagaagcgatgtcatacccgtcaggcacgccaccacgataatctgaatatacagatccatagtcgtgccttttatttcagatggttaatcagcatcggaatcgcgtgttcgacgtgctcaacggaaaggccaaacgccacttttccttcagcgatcattttggcgatatgctcgtctttcgctttaatgcctggtttggcaatggtgcaacttttgttatagcctatcaccgcgatggcaatcgacaatgccgcgcccgcaccggtattacacgcgccgatgtaataatccagttgcccggatttcaccttcattgccgcttccatgtcgttgtgaatgaaaacttcaaaacagccaggagccgtcgcttcaatagtttttttaatctgctcacgctgtaagcctgcaacgccaatctttttcatgagtctgtccttattggaaaaattgagagggattttcacgtaacatcacatccacatcggcctgactgaatcctgactggcgcaattgcggaataaaggtggttagtaaatagtcatagccataaccaccgttggcttttaaatgggagcggcgcgtaatatccatcgacagcatgacgcggttcagcaacccacggtcgcgtagcgcatgaagcatcgcaatacgcttttcgtccgggtagtaactgttcttgccgatggtgtcgaactgcacgtacgcgccgagatcgatcatcttcaaaatgttgtcgaggttgtctttcagatcgcagtgaccaacggtgacgcgcgaaagatcaaccccgtgggcttgtagcaacgccagttgctccagccccatcgtgctgaacgacgtatgcgtggagatcgggcgtccggtctggttatgcgccagcgcagcggcaataaataccttctcttccagcggcgtaatctttccttcgctggtgccgatctccgcgatgatcccggctttcagctccgtgccatcgataccctgttcaatttcatcgaccatctcctgcgccagttcctgcacgctgcgggtcgccacatgttccgggaaaaacgcgtcctggtaataaccggtacaggccaccacgttgatccccgtctcgcgcattacatcaagcataaattgcgcattgcgccccatgtaacggttggtcatctcaatcacattacgcacgccccgggtcatcaggtcgttcatctcctggcaaatgaacgcatactgatcaaggcggcagtccacgttgtttttaaagccggagagatcaatatgcagatgctcatgggcgagggtgtaacccgtcggatcaaaactcatagggtgtctcctgcaaaccggagggaggaaagaaaagagcgaccattttgtggcggtggcgcgcggaaaaattcacacacggtagcccccacatcagaaagcgtggtgcgcacaccgagctgcgtagcgatcatcccttgctgataaaccagcactggcaccacttcgcgggtatggtggctgtgaccaatggtcggatcgttgccgtgatccgccatcacgaccaggcaatcatctggctgcatcgcctcaacaagccgggcaaggttacggtcaacgacctgcaaacgttcggcataacgtgcgacgtcttctgcatgaccagcgaggtcggtttcctgaatgttggtgcaaataaacgccgtcggatgggtgttaaattcgttgagggtgatatccataatccgctggctatccaccagattttgccagctcacgccataaggattgttgacgatatctgccaccttacccaccagcacggttggcacgcctgcttcatacagtttttgtggcacctgcactttttcatcgacgccatagcccatatgcacgacctggaaaccgttgtcataagcgccagaacgcggcgcattgataccaataaagcgcccttctttgctttctgcggcatcgagaatgcgttgactgtcggttaacaggccaccaaatgtaatgacccgaccgacctgtacctgctcacgcacgatacgaccaattttgattgcgtcgtcaaaagagatcacagagagattggcggtaatgttatagacctggcctaaatccgcctcgagattatcgccaatcgcaaccgcctgattgacccacagaaattgcagatcatcgccacggcgctccacctgccagccagcggaaactaatgcctgctcaacacggtcaatcacatcgcgaaaaggcatccgcagcggcggtaacgggcgcgtgcctaaaatttcctgatgccccataaaggtatcgccaccttcatgttgcagctctgccacgccccaggttgcggaatctgacggctgcatatcgcctggcgcataacccaatgcgttgattagccccagcgtctccagcgttggtagctgcaaatgcggcaactggctcaggatgtgaccacatgtattcgctcccgcatcttgcggacgcaccagcgtgacatctttcattgcccctacgccaaagctatcaatcactaacaccacaaatcgcgccattacgcccccagagagtttccaagactgtcataacgaccgacgatttccggttcgccacgatgaataccggacaccagcaccacatcgctacgggtgacaaaaatctgcgtgcgaaaacagagcaccactgcactgcttaccggaaactcgcctgccagcggcagggtgtagtcgatactgctgtcatccacagttttgagattggtttcagtaatcttttgattttctggcgtaaacaccaacgcatgttgcgcatgaccacgacgatagtaaccgccgccgtagcagtagctgtcgccacggaaatgatgggagatttcacttaaccagagcatcgcgatacgttcaggctgatcgccctgctggtttgccggaatagtgcccgtcagcgcatgaccgggttcggcatgagtcacaccgtattgcgccagtaatggcagcgaagtgcagctggtcgctgaaggcgcgttcagttgctcaagtgcaataccagatttcgccagttgatcccgtgcctgtatcagcgtgtgaagattcggtgtcggcaaaacttttccgacagcctcatcccaaagcaggcaagggaaatgggtaagtccggctaaatgcagccctggcagattctggatttcggcgacaatctccggcaacaccttgagggcaaaaccgctctcctggcccggataaagaaaatcatcgtcgctataaactttaagcagcacagactggattcgcccggccttcaccgccgccgcagaaacttcccgcgctttgtcgagagtaaacacggtgatgacgtcggtgccctgttcaacggcgtcagcaacctgatgacaagggatttgtaccagatgcccctgatgcgccacaggcaaaccagcgcggcgcatgactcgcgcctctttgtaatccaccgccacaatgccgctgtagcctaatgccagcaatttttccgccagccacggattacgaccaaactgcttggtcatcagatacagttcaatgccgtaaagccgcgccgtctcaatcagccgcttaccgttttccagtatctgatccacgtcgatcacccagctgtccggggcgatcttgccctgctgccacaggcttagtgcggcggaaatcagcgccgggttctggcgtttcaatgcttctacaaacatcttgttgcctcgtttctgttccttgaattaaatattcatttttttgaatatttaggttgtgcgacgtggatttgtcgggagcttcaaacctcttcgttagcagccatccataatccataaaggttggccagcaaatagccttcttcacacgggttaacttccagtgcgaattccttcaacaacacctgatgcaattgcacaacggcttgccagtggctggattgcgccagttctgccagcaactcgttatccagcggctctatttcttcaccacggcgactgcgcatcagtgcactcgccatatgtgtcatcgccatcgttccttgctcactgcgcaccggcagatggcactctgtttccagtacgttgacgacctgcatcatgcctttgcagatgtccttatcaataacgcctgcctcgcaaagcaggttgagtctggtttccatatcagatgcctttcgtttaataactcggttcctgttccccactcactacccgttgttgatgggcgagcagggcgtgtttatctacaacggcacgcagcagttgttgcattgggtaatcatcgactcgcgtcaggaccacggcttcggtggcctgtaaaaatcgcggatcgtctgtgagcggcgtcgcctctaatcccagcatggtcagttcgttttccgccaccacgttccagatcaccgcatcgacatcgcctttaacaatgcgttgtaaactctcgtgataagagagatcgactcgttccacatcactaccgccaaaaaaaacatcggtcatgattttctgatccgccgaacggttatccagccccacgcgcttcacgtttgcggactcgcctttacggcaaatcaactggtgctcgccaacgtaggtgtgcggccccaactccagcgcgaggcataagcctttttgcgtgagataactttccgccgctagtcgcgaaaccaccgccatgtcatacacgccattaagcagacactccacgcgaatatccgcgccacgcatgtgcgcatagtaaaaaggaatgccatcaaactgggctttcaatccgctcgccaggccttcgtacaaacgggtatagggcaagggcattgcacataccacgttgttgatatccacatgagtcagcaatgctttgttatccatctcgaccagataactgccattgcgcccacggcgttcaatccgtatcgctccgcttgattccagcgttttcaacgcggcctgcgtcaggccaacggatgaacggcattcatttgccagctcatctatggttttcaatcgattaccgcacttttcacccaacaaataacgggccagcgtcgtgatgacgacgcctttcttttttgataaacgttcgacgcataataaattttcagtaaattgaatatttatatcttcaggaatttgaagataaggcgcaacagcgagatgtggaaacggcgaggcacttcacattttttcggattattgcaaatgaggataaaaaaaccgggtttccccgtttcagagtgatgataaaagcaaaattgcctgatgcgctacgcttatcaggcctacatttccttgcaatatgtgcattactttgtaggccggataaggcgttcacgccgcatccggcatgaacaaagcgcaatttgccagcaatagtgaattacggcttcgccacaaaaccaatcgcttcgtacaccgcttttagcgtacgggaagcgtgcgcgctggctttttccgcgccatctttcatcacctgttgcaggaaggcttcatcgttgcggaaacggtgatagcgttcctgcaattcagtcagcataccggaaacggcatcagccacttcacctttcagatgaccatacatcttgccttcgaactgtttttccagttctgggatgctctggcccgttaccgctgaaaggatatccaacaggttggaaacgcccgctttgttctgcacatcgtagcgaactaccggcggctcgtcggagtcagtgaccgcacgtttgattttcttcactaccgatttcggatcttccagcaggccgataacgttattgcgattatcgtcagacttggacatcttcttggtcggctccagcagcgacattacgcgcgcgccagatttcggaataaacggctccggcaccttaaagatctcgccatacagcgcgttgaaacgctgggcaatatcgcggctcagttcgaggtgctgtttctggtcttcacccaccggtaccagattagtttgatacagcaggatgtccgctgccatcagcaccggatagtcaaacagaccagcgttgatgttctcggcataacgcgcagatttatctttaaactgcgtcatgcgactcagttcgccgaagtaggtatagcagttcagtgcccagcctaactgtgcatgttccggcacgtgggactgaacaaaaatggtgcttttctcaggatcgataccacaagccagatacaaggccagcgtatccagcgtcgctttacgcagcttctgtgcatcctggcgcacggtgatcgcgtgttggtcaacgatacagtaaatgcaatggtagtcatcctgcatgtttacccactgacgcagcgcacccatgtagttaccaatggtcaattcacctgagggctgtgcgccactaaaaacgatgggcttagtcatttttcgattcctgattttcgctatgcggaagccctaatgcgggcagaaggtcatttatagactgataaattacatcaggctggctgagatcgatagcctcgccgtagttatatccgtaggttaagccaactgatgggcaacctgccgcttttgccgcctgaatatcattgcgtgagtcgccgacaaacagcatctgttgtggggcaattcccatccgctcagccaccagtaacagcgggtccggatgcggttttttgttttgcacatcatcaccaccaatcaccacgctgaagtatttggcgatatctaaggcttcgagcagcggcgcgacgaacggcgtcggtttgttggtgaccaggcctagcggcaggcctttagcctgcaacgcgcccaacgtatcggcaacgtgcgggaacaaaaacgtcccctcttcggcaacctcgccatagtagcgatcgaacagtttacgcagaatacgtacctgttcttctgccggaatgtcgtcatcaacgggcggtttacccattgttttacgctgagtcgcacgttcctgacgcgcccaggtcaatgcgcgctccatcagaacatctgcgccgttaccaatccaggtaataacgcgttcttcacctgcgacgggcaactccagcgcatacagcgccatatctaccgcagcagcaagaccaggagcactgtcgaccagcgtaccatcaagatcaaaagcgacgccgcgaatatcttcaaacttattcatgacttacctttgccagttcactgcgcatttcatcaatgacttttttgtagtctggctggtcgaagattgccgaaccggcgacgaacatatccgcgcccgccgcagcgatttcgccaatgttgttcaccttcacgccaccgtccacttctagtcgaatgtcaaagccagactcgtcgatacggcgacgtacttcgcgcagtttatccagtgtttgaggaatgaaagactgaccgccgaaaccagggttgacggacatcagcaggatcacatccagcttatccatcacgtaatccagatagctcagaggtgtcgccgggttaaataccagacccgctttacagccattttctttaatcagttgcagcgtgcggtcaacatgctcggaggcttctggatgaaaggtaatgatgctggcaccagcggcagcgaaatcaggcacaatgcgatcgacgggtttcaccatcaggtgtacgtcgataggggcggtaatgccatagttacgcaaggatttcagcaccattggcccaatcgtcagattgggaacatagtggttatccatgacgtcaaaatgcacgacatcagcgccagctgccagggcttttgcggtatcttcacccaggcgggcaaaatcagccgacagaattgagggggcaatcaaatactgtttcatccgcttctccttgagaattattttttcgcgggtgaaacgactcctggtttgtacaaagccagcagttcgtccacctttttacgtgtgccgccgttgctgcttatactgcgtcgaactttgacgacatgcaattttgcgcgctgataccactcacgcgttaacatcgtatcgtgattggagatcagcactggaatatggcgctcaaccagaccttcggcgatctccgccagatgcgcttgttgttcaagcgtaaaactgtttgtgtgatacgccgtaaagttggcggtcgcagacagcggtgcataaggcggatcgcaatagacgacggatgcatcatctgcgcgcgccatgctatcggcgtaagactcacaatagaaaaaggcattctgcgctttttcagcgaagtgatacaactctgcttccgggaaatagggttttttgtagcggccgaacggcacgttaaactcaccgcgcagattgtaacgacacaggccgttgtaaccgtagcggttcaaatataaaaacagtaccgcccgacggaacggatcctggcttttgttgaactcttcgcggaactgatagtaaacctcggcgcaatttgtttcgggaacaaacagctcgcgtgcggcctgtacgtactcatcagtacgcatcttcacaatgttatagagactgatcaggtcgctattgatatcggcaaggatataacgagaaaagtcggtgttgagaaacaccgacccggcacctacaaaaggctcaaccagacattcgcccttgggcaaatgccgtttaatatcatcaagcaggggatacttgccccctgcccacttcaaaaaagcgcgatttttcttcatgctgactaactaattacaccttctccggctgtggagaaagctccgacagcatccagcgcttcaggcaactcccgcaacgataaaccattgcgggagataaccttgattacttcagatcggcctgtacctgacgcagcggtttcgcccacgggtttttggcctggacatctgctggcaatgtagataccgcttttttcgcctcttctttcgaagcgtacacgccagaaaccaggacataccacggctgaccattacgcgtcgtttcatagacaacgtagtttttcagattctctttcttcgcccaaccgttcaggttgtcgtagttagaggaactgctcagctgcagagtgtaatggctggacggtgccgatttcaacgaaccaacattacctgcggtcttcgccccagcagcgggtgttgctgtggtttgcgccggggatgccgtctgtactggagccgtagtcgccgtctcttttggtgctggcgtagaagtcgcagccggtgccttcgtgctcgccacaggggcagctggttcagtacgcttcggcgtctgtgctaccggcttcggctccgttttcacggttgcttgcggttttttcggttcaatcaccgcctgctgacgagctgggcgcgtagtggacggacgttcagcggtttgcgttttcgccgtgtcacgcgatgcattgccattgcgaacaggcgcaaccgttgcgggttcagtcggcaacgtggaattgaccgccacattgttcagctgttgctgattttgtggctgggtcagcgcattgttcaggtcaccctgcacttcaacacgttgttgaccatccgttgccaccggggtttgcccttgagtcggcgtagaagagatcggtggcagagaaacatcctgctgagtattttccgcagacgtggttcccggcgctggctgcacgccattcgcctgatcggtcgcattgccagcaagatcaatactcttctcgccagacgcggtttgatcgctggaagtggtcgagggggcttttagcgcagaaccgataccgatgatcaacagcagtagaaccagaatgccgacgcccatcatcatatactgacgagaagcgggtttactggctgcttttttgcgcttacgcggacgacgctctacgcgctcttcatccacggtttcatcttcggattcgtcaatttcttcttcgatttccggttcctcattgcgctctttttgcgcacgagtcggacggcgatcgtcagtgtcatcaagttcaatatcatcaaaattgatctgcggttcgccacgttcagtacgctcagaacgttcagaagattgacgagaacgaccagtacgacgatcgctgggatcgggtttcagctcgtcttctggtttgaattcatccatttaacaccccactaaaaggttaatgcttaccacgttgcaattaacctgaagctaatagaccgcttgataagcggcctgacctttcttgttgttacgctgattgacaatcggcaatggcgttaagaacaagctcgtgcgaaacgccgctgcgaacttcactcttaccaattgccaacggaagaattaagcgcatctctcccgcaaggactttcttgtcacgcagcatatgcggtaaatacgcctgcgcggacatttcgcgcggcccattgaccggtaacccagcccgcttgagcagggttataatacgctgcgtttcggcagaactaaactgcccgagacgttccgacgtccgcgccgccatcaccatacccgcagcgaccgcttcaccatgtaaccaattgccataccccatttcagcttcaatggcatgaccaaaggtgtgtcccagattcagtaaagcacgtaacccggtttcgcgctcgtcggcggcgacaacttctgccttcagttcacaacaacggcgaatacagtacgccattgccggaccgtccagacgcaacaacgcatccagattctcttccagccagttaaaaaacgcaccgtcaagaataatgccgtatttgatgacttctgccagccccgacgctaactcacgcgggggaagcgttttcagacagtcgagatccaccaccactgaagcaggttggtagaacgcgccaatcatgtttttaccgaggggatggttgaccgcagttttgccgccaacggaggaatcgacctgcgacagtaacgtcgtcgggacttgaatgaaacggacaccgcgctgataactcgccgccgcgaagccggtcagatcgcccactacgccgccgccaagcgccaccagcgtagtatcgcgaccatgcggtttttgtaacaacgccgtaaagacggtatcgagtacagccaggcttttatactgctcgccgtcagggaggataacgctatcgacgttaacacccgcctgttcaagtacgccgcggaccttatcgagatacagaggagccagggtttcgttggtgaccaacatgacctgctcgcccgatttcagcggtaagaatgaagctggttcattaaacaaaccagatgcgatggtaattgggtaactacgttccccgagagtaacgacaatcctctccataacgcgacatccaccttaattactgtacccgcagacgagtgtatataaagccagaattagttgctttccagcatgtgaataatctggtttgcaaccactttagcgctttgatcatcagtacgaatggtcacgtcggcaatctcttcatacagcggattgcgttcattggccaacgcttccagaacttcacgcggcggtgtttcaacgtgcagcaacgggcgttttttatcacgctgcgtgcgtgcaagttgcttttcgatggtcgtttcaagataaacgacaacgccacgagcggaaagacggttacgcgtttcacgggatttcacagagccgccgccagtagccagcacaataccctgtttctcggtcaactcattgatgaccttttcttcgcgatcgcggaagccttcttcgccttctaaatcgaaaacccagcccacatcagctccggttcgtttctcaatctcttgatcggaatcgtaaaattccatattgagttgttgagctaactggcgcccaatagtgctttttccggcacccataggcccaaccagaaagatattgcgtttctctgccattttttcggtactactaagactattcgttaatgataaacccgcttcgctcagagagcgccgcaggacatgaactgaaacctcataagatattgcgagagtcagactgaaaattatctcaatactccagcgggtttggcaactgaataaatcacccatccctctgcatatctggtcgctgcaagcgcgctgccttgctaccaccgctctggcgataaatcaccgggtaagattagcgtaaaaaagacagcaaaatgccgcctgaatgataaatcatcatcatggaacgcaggcagcgaagagcaccaactctcaaatcggtactccttgtatgctaaatacctgcgcgcgtcaaatagatgaaacacgttcagcgtaaaaacattaccgcttttacggctgtttactcactggaaaccagtcgtggcgtgataaacaccactaactcgcgtcgttcatcttcttttccgtcatgacgaaataattgcccgaaccagggaatgtcgccaagcaacggtacgctatcctgacccgatttatttttacgggtaaaaatgccgcccagcgccaacgtttctccgcttttgacctcgacctgcgtttcgatctcctgcttatcaatcgccagcacttcgccatcggcctgctgtagcacctgccccggaacgttctggctgatgtgtaatttcagccggatgcgacctttttgtaacaccgtgggcgtgacctccatccccaggacggcctctttaaattccaccgacgtcgcgccactttccccgctggaaacctgatatggaatttcgctcccctgtttaatgctggcaggctgaagatgtgaggccagcagacgcggactggcgataatatccagctgctgtttttgttcgagcgcggaaagctcaagatccagcaagcgtccgttgatgcgcccaatgttaaaaccgacatgcgttgtcgccgtcgctacggagaggtcgctaccaagcgtggtgacttgcccaacgccaccagcgtgttgcgcatcggccagcgtccatttcacgcctaactcacgcaaacttttttcattaatggtgacaatatgcgccgacagctcaacctgcccgaccggcagatccatttgcgctacccactgttcaagcgcgcttaacgccgttttgttatctcgtagcaaaaggcgattggtgcgtttatcgacggtcatactccctttggcactcagtagcttctcccccgctttcgccagttctcccgcgtcggcgtattgcagggttatactgcgattttccagcggcagatttgcctgcgcccgcgcctgctccgcctcctggcgggcgatattgttattctgccaggcaatggaatgcactgagagaatgttgccttcctgccgcgttatcagtccggcgcttttcactacagtttgtagtgcctgcttccagggaacatctgttagatgtaacgacaccgtaccgctgacgtctggcgacacgaccaggttcaacttctcctgttcagccagcgcctgcaacacctgagctaccggaacgtcatccaccatcagcgtcactttttgcggctttgccgcctgtacgccgggtatcagcatcaacagtagtgcggctatccattgcttcatttgtatctccttgccgttgccacaaccattgtggcggttcgcagtttgtcccggtacccagcgttagtacgtctggcgtcagctgtaaaattgtccagccgttttccagcacatcgttttgctgcacccgtcgccatttcttttgcccgtcttttattacaccgatgatgcgctcgcctcgccctaccatcccctgatagcgccactggctaagttcgctaatccggcatagatcttccggcggtttaaaagggtcacgcataccggttaaaaggcacaatgcaatacctgccaacaaccagcgtttaaccctcatgcggcgtctccagttgtagcgtgaacaaaagatcatcaccttccacgcttaacgaaaaacggctcacgctgacgttgcgctctgccagccgtgtaaatgccgacggcactgcttcccacagcgttttcaacgccaactcgcctccctgcgcggatggatgccaggaaaccagttgcgcgccggataactgaaaatccagtggcgaaaagggcagcgttttttcctcgctgaagggagcggtgtctaccaggcgatacagtgcggcccactgctggtgatgacttgcccgtagtcgaattaatgcgtcgcgctcttcatggtgtgtcgatgacagaaaaatgagcgtaactaacatcagcaaccagaatgcccagcaaagctggcggaggcggggtgatgtggcgaaccaccagtcaaagaacatgttcatcgctaaccttccttgttaactgatactcaaattgccagcgtccctgcgcatcctgctgcgtggctccccgctgattgagatgaaaagatgcatcctggcggagtgacgtttctagtgcgtttaacgcggtaatgcttgttgtcagccccttgatctccagcgttccctgctgccagcttatcgttgtcagccaggcgtgctcgggtaaaagcgccgccagtgcttccagcgcagattgccagtcgcgggtaaattgtcgctggcgctgccgttgcgaacgctgttcgcgtaactgctgttgctccagcaaacgtggcttcgttatctgtaagctgcgggcgagttgttgttccgcctgaagcaaaactgcgtctatgcgcgcttcggcgctgcctgtcagacgcagtattagcgttatcccgacggccagcagcagaggcgcaacgaacatcagcaaccagaaacgcagaaaagcggtccggcgttgctgtcgccagggcaaaaaattaattggcgggttcatcagtacgccttcccaagcgccagccccagcgcgatggcaaagtctccacctggcggcggtagcggcggctgacgaacagaaacggcctcccagggatcaaatccgccttcgccacatatcgcgacgctttcgggatcaacggataacgctgccgccagctccttcgcgctagtcatccccaccgccagtttgcgcccccagctatagcgcgtcgcccacagccactgttcgttatcacgccaggccagacattgctgatgagaaggtaaaaaaggcaggaatcgctgtaatgcactggcatccggggtgatcgcgctcacatgaacacgcaacctttctgccagagtaagcagcgttgccagctctttgctttgcgcggcagtcacgttataggcgggactgagtgagtcttcgctgtaatcgaagcgcagggagtccggatccatatccagctcgcgggccatcgtccctgacagccaggccgtttgctcccgctcaccaagggacatcgacgggcgcggaaatgaccgctgtaatgtgcgactggcgggaaacgccaacataatgtgatgacgctgcggcagttcgcgactccacggtaacaacgttttagccagctgctgcgcatcaacaatccgcccatctttgataatgtcgttctccagcggcaaccgccaccagcgttgcaaaaagcattcttttgcgccccgcacgatcgcaaccgctaccgcttcttgctgttgtaaatgcaaaccaatttgccagatcttaaatgccattgtgatgatctccttatcacccgtcactctgacgggtatatcaatgcgtctggcttgcctttatactaccgcgcgtttgtttataaactgcccaaatgaaactaaatgggaaatttccagtgaagttcgtaaagtattttttgatccttgcagtctgttgcattctgctgggagcaggctcgatttatggcctataccgctacatcgagccacaactgccggatgtggcgacattaaaagatgttcgcctgcaaattccgatgcagatttacagcgccgatggcgagctgattgctcaatacggtgagaaacgtcgtattccggttacgttggatcaaatcccaccggagatggtgaaagcctttatcgcgacagaagacagccgcttctacgagcatcacggcgttgacccggtggggatcttccgtgcagcaagcgtggcgctgttctccggtcacgcgtcacaaggggcaagtaccattacccagcagctggcgagaaacttcttcctcagtccagaacgcacgctgatgcgtaagattaaggaagtcttcctcgcgattcgcattgaacagctgctgacgaaagacgagatcctcgagctttatctgaacaagatttaccttggttaccgcgcctatggtgtcggtgctgcggcacaagtctatttcggaaaaacggtcgaccaactgacgctgaacgaaatggcggtgatagccgggctgccgaaagcgccttccaccttcaacccgctctactcgatggatcgtgccgtcgcgcggcgtaacgtcgtgctgtcgcggatgctggatgaagggtatatcacccaacaacagttcgatcagacacgcactgaggcgattaacgctaactatcacgcgccggagattgctttctctgcgccgtacctgagcgaaatggtgcgccaggagatgtataaccgttatggcgaaagtgcctatgaagacggttatcgcatttacaccaccatcacccgcaaagtgcagcaggccgcgcagcaggcggtacgtaataacgtgctggactacgacatgcgccacggctatcgcggcccggcaaatgtgctgtggaaagtgggcgagtcggcgtgggataacaacaagattaccgatacgctgaaggcgctgccaacctatggtccgctgctgcctgccgcagtcaccagcgccaatcctcagcaagcgacggcgatgctggcggacgggtcgaccgtcgcattgagtatggaaggcgttcgctgggcgcgtccttaccgttcggatactcagcaaggaccgacgccgcgtaaagtgaccgatgttctgcaaacgggtcagcaaatctgggttcgtcaggttggcgatgcatggtggctggcacaagtgccggaagtgaactcggcgctggtgtcgatcaatccgcaaaacggtgccgttatggcgctggtcggtggctttgatttcaatcagagcaagtttaaccgcgccacccaggcactgcgtcaggtgggttccaacatcaaaccgttcctctacaccgcggcgatggataaaggtctgacgctggcaagtatgttgaacgatgtgccaatttctcgctgggatgcaagtgccggttctgactggcagccgaagaactcaccaccgcagtatgctggtccaattcgcttacgtcaggggctgggtcagtcgaaaaacgtggtgatggtacgcgcaatgcgggcgatgggcgtcgactacgctgcagaatatctgcaacgcttcggcttcccggcacaaaacattgtccacaccgaatcgctggcgctgggttcagcgtccttcaccccaatgcaggtggcgcgcggctacgcggtcatggcgaacggcggcttcctggtggacccgtggtttatcagcaaaattgaaaacgatcagggcggcgtgattttcgaagcgaaaccgaaagtagcctgcccggaatgcgatattccggtgatttacggtgatacgcagaaatcgaacgtgctggaaaataacgatgttgaagatgtcgctatctcccgcgagcagcagaatgtttctgtaccaatgccgcagctggagcaggcaaatcaggcgttagtggcgaagactggcgcgcaggagtacgcaccgcacgtcatcaacactccgctggcattcctgattaagagtgctttgaacaccaatatctttggtgagccaggctggcagggtactggctggcgtgcaggtcgtgatttgcagcgtcgcgatatcggcgggaaaaccgggaccactaacagttcgaaagatgcgtggttctcgggttacggtccgggcgttgtgacctcggtctggattggctttgatgatcaccgtcgtaatctcggtcatacaacggcttccggagcgattaaagatcagatctcaggttacgaaggcggtgccaagagtgcccagcctgcatgggacgcttatatgaaagccgttcttgaaggtgtgccggagcagccgctgacgccgccaccgggtattgtgacggtgaatatcgatcgcagcaccgggcagttagctaatggtggcaacagccgcgaagagtatttcatcgaaggtacgcagccgacacaacaggcagtgcacgaggtgggaacgaccattatcgataatggcgaggcacaggaattgttctgattaaaaaggcgcttcggcgccttttcagtttgctgacaaagtgcacttgtttatgccggatacggcgtgaacgcgttatccggctaacaaaatcgtgaaaactcaataaattgcagaaaccccataagcctgataaacattgtgcatcaggcaaacttcacgcatttacactcgcccctgccctttcaaccattcgcgcacgaggaacagcgcactgacattgcgcgcttcattgaagtcagggtcttccagcaaatccatcatatgcgccagcggccagcgcacctgtggtagcggctctggctcatcgccttccagtgattccgggtagagatcttgcgctaccacgatattcattttgctggaaaagtaagacggtgccatgctgagcttcttcaaaaaagtcagatcgttcgctccaaatccaacctcttcttttagctcgcggttagcggcttcgtagacgctttcacccggatcaattaatcctttcgaaaaacctaattcgtaggattcagttcccactgcgtattcgcggatcaggatcaggtgatcgtccacaatcggcacaatcatcactgcttcccggttggttggacgcattcgttcataaacacgccgcacgccattgctgaactccagatccacgctctcgacggtaaacagtcgggaacgggctacagtttcaacattcagaatggtgggtttttgtaatgatttgctcatcgtgggatctatgctgtgaaatcagcggttattgtgcgatatcggacacgctttcggcaatgtgaattgcatgttatttacatttatgtaacttaataaataatcgtcctcaaatcaaattaaaagtcaataggttgaaataactccaggaatttgctgatattccgccttcagagggtttgctatgatcagcggttactgtgatgtgcttaatgatgctcaagttaaactccacgcttgccgatagccaaccgcagaatcatgtattgtgtccggtgcgactgaccacgcctgacagactaagtaagatggggaaagcatgagcaccattgtgatttttttagctgctttgctggcctgctcactacttgcgggatggctgataaaagtgcgatccagacggcgtcagctgccctggaccaacgccttcgcggatgcgcaaacgcgtaaactcacacctgaagaacgtagcgccgttgaaaattatcttgagagcctgacgcaggtattacaggtgcctggcccaacgggagccagcgcggcaccgatctctctggcgctgaatgccgaaagcaacaacgtcatgatgctgacacacgctatcacgcgttacggcatctctaccgacgatccgaataaatggcgttactacctcgattcggtagaagtccacctgccccctttctgggaacagtacatcaacgatgagaataccgttgaactgattcataccgattcgctgccgctggttatttcactcaacggtcatacgctgcaggagtacatgcaggaaactcgcagctatgccttgcaacctgttccgtcaacgcaggcgtcgattcgcggggaagagagtgagcaaatcgagctactcaatattcgcaaagaaacgcatgaagaatatgcgctgagtcgtccgcgcgggctgcgtgaagcgttgctgatcgtcgcctccttcctgatgttctttttctgcctgattaccccggatgtatttgttccgtggctggcaggcggcgcgttactgctgctgggcgcaggtctgtgggggctattcgcgcccccggcaaaatcctccctgcgggaaattcattgtctgcgcggtacaccccgtcgttggggattgtttggcgaaaacgatcaggaacagatcaacaatatttcactcggtattatcgacctggtctatcccgcacactggcagccatacattgctcaggatctcggtcaacaaaccgatatcgatatctatctcgaccgccatgtagtgcgtcagggacgatatctttcgctgcatgatgaagtaaaaaactttccgttacagcactggctgcgcagtacgattatcgctgcgggctcgctgctggtgctgtttatgctgttattctggatcccgctggatatgccgctgaaattcactctctcatggatgaaaggcgcgcagaccattgaagccaccagcgtaaaacaactggctgacgctggcgtgcgggtaggcgatacattgcgtattagcggtacgggaatgtgtaatattcgaacttccggaacctggagcgcgaaaaccaattcaccttttttaccgtttgactgctcgcagatcatctggaacgacgcccgctcattgccattaccagaatctgaactggtcaacaaagcgacggcattgactgaagcagttaatcgccagctgcaccctaaaccggaagatgaatctcgcgtcagtgcctcattacgttcagcaattcaaaaatccggcatggtattgcttgatgattttggcgacattgtactgaagacagcggatttatgttctgccaaagatgactgtgtgcgactgaaaaatgcgctggtcaatctcggcaacagtaaagactgggacgcgctggtaaaacgcgccaacgccgggaagctcgatggcgtgaatgtgttattacgcccggtgagtgcggaatcgctggataacctggtggcaacctccaccgcgccgtttatcacgcatgaaacggcgcgagcggcacaatcactaaacagtccggcccccggcggattcctgattgtcagcgacgaaggcagcgattttgttgatcagccctggccttcggcatcactttacgactacccgccgcaagaacagtggaacgctttccagaaactggcacaaatgctgatgcatacgccgtttaacgccgagggtatcgtcacaaaaatcttcactgacgccaatggtacgcagcatattggccttcatccgatcccggatcgttccggcctgtggcgctatctcagcaccacattgctgctactgacgatgctgggtagcgccatttacaatggcgtacaggcctggcgtcgttaccagcgtcatcgcactcgcatgatggagattcaggcctattatgaaagctgcctgaacccgcaactgatcaccccttcagaaagccttatcgaataacacgtttgcgcggcaggttatgctaccctgtcgcgcaaattgcttcactctggagatttccctcatgcatatcaacattgcctggcaggacgtagataccgttctgctggatatggacggcacgttgctcgacctcgccttcgataactatttctggcaaaagctggtgcctgaaacatggggcgcgaaaaacggggttacgccacaggaagcgatggaatatatgcgccagcaatatcacgacgtacagcatacgctaaactggtactgtcttgattactggagtgagcaactgggtctggatatctgtgcgatgaccaccgagatgggaccgcgtgccgtactgcgtgaagataccattccgtttcttgaggcactgaaagccagcggtaagcagcgaattttgctcaccaatgcgcatccgcacaacctggcggtaaaacttgagcataccggtctggacgcacaccttgatttattactttccacccacacatttggttatccgaaagaggatcagcggttatggcatgcggtggccgaagctacgggtctgaaagctgaaagaacgctgtttattgatgacagcgaagcgattctcgatgctgccgcgcaatttggtattcgttactgcctcggcgtgactaatcctgattccgggattgccgagaaacagtatcaacgccatccgtcactgaatgactaccgccgcctgatcccctcgctaatgtgaaggagacgccatgaaagagaaacctgctgttgaggttcgactggataaatggctatgggctgcccgtttttataaaacccgcgcgctggcccgtgaaatgattgaaggcggtaaggtgcattacaacgggcagcgcagcaagccgagcaaaatcgtcgagctgaatgccacgctcactctgcgccagggaaatgacgaacgcacggtgattgtaaaggcgattactgaacagcgtcgccccgccagcgaggcagccttgctgtatgaagagactgcggaaagtgtagagaaacgcgaaaaaatggcgctggcacgtaaacttaatgccttaaccatgccgcacccggaccgacgcccggacaaaaaagagcgccgcgacctgttacgatttaaacacggcgacagtgaataactgtcacctgcaagagagatgattatgccgcaacatgaccaattacatcgctatctgtttgaaaactttgccgtgcgcggcgaactggtaaccgtttcggaaaccctgcaacagatccttgagaaccacgattatccgcagcccgttaaaaacgtgctggcagaactgctggttgcgaccagcctgttaaccgctacgctgaagtttgatggtgatatcaccgtacagctgcagggcgacggtccgatgaatctggcggttattaacggtaacaataaccagcagatgcgcggtgtggcgcgcgtgcagggcgaaattccagaaaatgccgacctgaaaacgctggtcggcaatggttacgtggtgatcaccattaccccgagcgaaggcgaacgctatcagggcgtagttggtctggaaggtgataccctggcggcctgcctggaagattactttatgcgttctgaacagctgccgacgcgcctgtttattcgcaccggcgacgtagacggcaaaccggctgcaggcggtatgttgttgcaggtaatgcctgcgcaaaatgcccagcaggacgactttgaccacctggcgacgctaaccgaaaccatcaaaaccgaagaactgctgaccttaccggcaaacgaagtgttgtggcgtttgtatcacgaagaagaggtgacggtttacgatccgcaggatgtggagttcaaatgcacctgctcgcgtgaacgttgcgccgatgcgctgaaaacgctgcctgatgaagaagttgatagcatcctggcggaagatggcgaaattgacatgcattgtgattactgcggtaaccactatctgttcaatgcgatggatattgctgaaatccgcaacaacgcgtctccggcagatccgcaagttcattaatgagtatgtccggcagagagggctctgccggattttacgactaatacacctgatgcgctttgtcactcattcagattcacattcagcctttcaccatccactacaagatcgcgccacgctttaggcttcgtccccagttttccatccttcgcagctgtgagtaatttttctttcgttatttcgttcggaagtaaactcatatcaagcgcgtcccattcttttctgtctgagtcaaagccatagacaatgactctgtcatcattaaaagcaaacaggatccgctccgcctgaccatcactattcagatcttgctcgaccaggacgcaggcgtctttttcaatacaggtcatcacgttatagcgatcctggattaaggccgaccagaatgtcgcatcaggtttaacagaaccaggggcaattaacacattatcggctaatactttttccgatacctgttgctgaagatgttgctctccatctaacgccatcagcagatcccgcgcgcgtttcgggtctttcataaacccggcatcgcttttcagcgactcaagcgcagcacgtccatagcgaccgctctgctcgagcatgtagatagttacctggtctgacgtgtttttgccgctctgataacgcgccatatggctgttcacgctaatgcgcatactgtccagcaccggcgaattaagaagcaccagtatcaccaacaccaataacgaaaccgcaaggttcactttgccctgaagaacaacgggattttgccctttacgccagacgatgctgacaaaataccccagcgaccacaccagtaacaccagcaccgccagcacgccctgcaagcggtcgacagtccagccgtactgagcgacccgcagccataacgcccaggcggcgacgaacacatacagcggagcaaccagcaaagcggttttaatcaggcaacgcaacggccctgtccagggaagtgacgctttttgcggatcgcggacaatagccattaagatcaattgcaaaaaggccagcgtcaacagcaacccggcggcggagatgtggcgagaaatcgcgctcaggcccgtaaacggcagggtgatgataaacatcagggttagcaatgatactaacggcagcaaccccgtggcgattaacgtgaacaacttttgaatagagtcgattaaacgtgactgtgttcgcgcgaggatcaccgccagcgcggtaaccagacctaacgtgagataaataaaccagtcggttgcaaaaaagagcgtattgaaaaacgtgatgccaacaagtttaaacaactcactccacagtaaaagcaccagccacgtcaagccattggcgagaaaaatcaccagtaatataagtacgttatgccatactgactggtaaaaatagcgatagcggctactgtcattgcggatgcgaaggctttgttgtatccacggtagcaacaacattgccatcaacagcagatagcaaccaaaatcccaaagcgccttttcagctctccaggggttcatgccatcagtttgccacttcagccagccgctcatccccagcgtggcaataaacactagcgccagccatccccaaaggcgcttctgtttaaaagagatcacggagaagagtaaaacggatgaaaacgcgacggtcgcaggcacgccataaacaatccaactgtgattttttccggaaagccaggcgatcagcaggtagcaaaccagaccctgaagtaatccggtagcaatcatcccccagcgtgttgcgggtgaaagttcaacgttatccatgttggttatccagaatcaaaaggtgggttaattatcgcatccgggcagtagtattttgcttttttcagaaaataatcaaaaaaagttagcgtggtgaatcgatactttaccggttgaatttgcatcaatttcattcaggaatgcgattccactcacaatattcccgccatataaaccaagatttaaccttttgagaacattttccacacctaaaatgctatttctgcgataatagcaaccgtttcgtgacaggaatcacggagttttttgtcaaatatgaatttctccagatacgtaaatctatgagccttgtcgcggttaacacccccaaaaagactttactattcaggcaatacatattggctaaggagcagtgaaatgcgcgttaacaatggtttgaccccgcaagaactcgaggcttatggtatcagtgacgtacatgatatcgtttacaacccaagctacgacctgctgtatcaggaagagctcgatccgagcctgacaggttatgagcgcggggtgttaactaatctgggtgccgttgccgtcgataccgggatcttcaccggtcgttcaccaaaagataagtatatcgtccgtgacgataccactcgcgatactttctggtgggcagacaaaggcaaaggtaagaacgacaacaaacctctctctccggaaacctggcagcatctgaaaggcctggtgaccaggcagctttccggcaaacgtctgttcgttgtcgacgctttctgtggtgcgaacccggatactcgtctttccgtccgtttcatcaccgaagtggcctggcaggcgcattttgtcaaaaacatgtttattcgcccgagcgatgaagaactggcaggtttcaaaccagactttatcgttatgaacggcgcgaagtgcactaacccgcagtggaaagaacagggtctcaactccgaaaacttcgtggcgtttaacctgaccgagcgcatgcagctgattggcggcacctggtacggcggcgaaatgaagaaagggatgttctcgatgatgaactacctgctgccgctgaaaggtatcgcttctatgcactgctccgccaacgttggtgagaaaggcgatgttgcggtgttcttcggcctttccggcaccggtaaaaccaccctttccaccgacccgaaacgtcgcctgattggcgatgacgaacacggctgggacgatgacggcgtgtttaacttcgaaggcggctgctacgcaaaaactatcaagctgtcgaaagaagcggaacctgaaatctacaacgctatccgtcgtgatgcgttgctggaaaacgtcaccgtgcgtgaagatggcactatcgactttgatgatggttcaaaaaccgagaacacccgcgtttcttatccgatctatcacatcgataacattgttaagccggtttccaaagcgggccacgcgactaaggttatcttcctgactgctgatgctttcggcgtgttgccgccggtttctcgcctgactgccgatcaaacccagtatcacttcctctctggcttcaccgccaaactggccggtactgagcgtggcatcaccgaaccgacgccaaccttctccgcttgcttcggcgcggcattcctgtcgctgcacccgactcagtacgcagaagtgctggtgaaacgtatgcaggcggcgggcgcgcaggcttatctggttaacactggctggaacggcactggcaaacgtatctcgattaaagatacccgcgccattatcgacgccatcctcaacggttcgctggataatgcagaaaccttcactctgccgatgtttaacctggcgatcccaaccgaactgccgggcgtagacacgaagattctcgatccgcgtaacacctacgcttctccggaacagtggcaggaaaaagccgaaaccctggcgaaactgtttatcgacaacttcgataaatacaccgacacccctgcgggtgccgcgctggtagcggctggtccgaaactgtaatgatttgaagctggagaatatctatccagtatcttatagaaagcaaaacgggaggcaccttcgcctcccgtttatttacccttcttttgtcgtgccctgcgcccgcgttaccggcactggcagccaggcgcgaatggaaagcccgccccgctcgctggtgccaagctccagcatcccgttatggttatccacgatacgctgcacaattgccagccctaatcccgtgccgctaatggtgcgcgcactgtcgccgcggacaaacggctggaacaggtgcttacgttgttccggcgcaattcccggaccgtcatcttccacctggaaccaggcgcgattcggctccgttccgctgctgactttgatccagccattgccataacgggcggcgttgaccaccatattcgccaccgcgcgtttgatcgacagcgggtgcattttcacttcaatgctgccggggtaaagcgcggtttcaatttcccgctcatagccactttcggcagcaatcacctcaccgagtactgcattaagatccgccatttccatcggcatctcctgcccggtgcgcaggtagtcgataaactgctcaatgatggcgttgcactcttcgatatctttattgatcgattctgccagatagccatcctgctcgctcatcatctcagtcgccaggcgaatacgcgtcagcggcgtgcgcaagtcgtgacttacccccgccatcagcagcgtgcggtcatccgccagttgcttaacaccagccgccatatggttaaaggcacgggtaacggaacgcacctccgaagcgccatactcacgcagcggcggcggaataatccctttaccaacctgcaaggctgcgtgttcgagatcgaccaacggtcggttctggatacgaataaacagccacgccccgcctatcgccaatagcataatcgccagcgtatagcggaacagcggagagaaatcgccctgatgaatttcggtcagcggcacgcgtacccagatattgggcgacagccaggttttcagccagacgacaggcgaacttttgttgacctcaacgcgcacttccgtcgggccgcccagttgctgcgccatctgatggcttaagaattcatagtgttgcgcccaacgcagacctgcctcttcggcagcctcgttggagtagagagagatccccagctcacggtagatctcccgacggaaagcgggaggcacaaccaactgcgtgccgtcctccagttgcagtttgtcggtcatcaacatacgcacttcgtacgcgaggactttattaaactgctggaggctcggcaaaatcgcgaagttcagcaccaccagataagtcgtcaccaggctggcgaacagcaaggtgacgatgagcaataacgtacgggcaaatgaacttcgtggcgagaagcgcaatcgcctcatgctttagagccgtccggtacaaagacgtagcccagaccccagacggtctgaatgtaacgcggatgcgctggatcttcttccaccatgcggcgcagacgcgaaatctgcacgtcgatggagcgttccattgcggaatattcacgaccacgggcaaggttcatcagcttatcgcgggagagcggctcacgcggatggctgaccagtgccttcagtaccgcaaactcaccgctggtgagcggcatcggctcgtcttcgcggaacatttcgcgcgtaccgaggttaagtttgaacttaccgaaagcaattaccgcctcttcctgtgacggtgcgcctggcagttcgttcgcctgacgacgcagcaccgcacggatacgggccagcagttcacgcgggttaaacggttttggaatgtagtcgtcagcgccaatctccaggcctacgatacggtccacttcttcccctttcgccgtcaccataatgatcggcatcgggttgctctgactacgaagacgtcggcaaatcgacaagccatcttcaccaggtaacattaaatccagtaccataagatggaaagattcacgagtcagcaggcgatccatctgttctgcattagcgacgcttcgaacctggaagccttgttcggtgagataacgttccagcagcgcacgcaggcgcatgtcgtcatcgaccaccagaatcttgtagttctcttgcattgtttgtactcccaaaggttcgcaacaatttgtaagcgtgtattcttaaaaaagctcacgttcgtcaccagctaaatctggtatgaatttcagcctaaattgttacaaagcatattaaacagcagcttaagtatacaatttattcggcgaaacattattgattctgttgatatgatcacgttatacccaatgtgcgcattatcaaacagacaaagggaatcaacgagatgaaaacgcccctggttacccgggaagggtatgaaaaactcaaacaagagcttaattatctctggcgtgaagaacgcccggaggtcacaaaaaaggtgacctgggccgcaagtctgggcgaccgcagcgaaaatgctgactatcagtataataaaaagcgtctgcgtgaaatcgaccgtcgcgtgcgctatctcactaaatgcctggaaaatctcaaaatcgtcgattactcccctcagcaggaaggcaaagtcttttttggcgcgtgggtggagattgaaaacgacgatggcgtgactcaccgtttccgtattgtcggctacgatgaaatttttggccgtaaagattacatctctatcgattccccgatggcccgcgcattgctgaaaaaagaagtcggcgatctggcggtggtgaatacccctgccggggaagcgagctggtatgttaatgctatcgagtacgtgaaaccgtaaggaagagtcttaacctcctgccgatggctggcatttttgccagccagtccgtataactatcccctgatttttgatccgaaaagatgaactcaaaccatgatgaatgattcgttctgccgcattattgcgggtgaaattcaggcgcgcccggaacaggttgacgctgccgttcgcctgcttgacgaagggaataccgtgccgtttatcgcacgttatcgtaaggaaatcaccggcggtctggatgacacgcagctgcgtaatctggaaacgcgtctgagctatctgcgcgagctggaagagagacgtcaggcgatcctcaagtccatttccgagcaaggcaaactcaccgatgatctggcgaaggccatcaacgccaccctaagcaaaaccgaactcgaagacctctacctgccctacaaacctaaacgccgcacccgcgggcaaatcgccattgaagcagggcttgagccgttggctgacctgctgtggagcgatccgtcacacacgccagaagtcgccgctgcacaatatgtttatgccgataaaggcgtggcagataccaaagccgcgctggatggcgcgcgctatatcctgatggaacggtttgccgaagatgccgcgctgctggcgaaagtgcgtgattatctgtggaagaacgcgcatttggtttctacggtggtgagcggtaaagaagaggaaggggcgaaattccgcgactatttcgatcatcacgaaccgttgtccacggtgccttctcaccgcgcgctggcgatgttccgtgggcgtaacgaaggcgtacttcagctttcgctgaatgccgatccacagttcgatgagccgcccaaagagagctattgcgagcaaatcatcatggatcaccttggcctgcgcctgaacaatgccccggcggatagctggcgcaaaggcgtggtgagctggacgtggcgcatcaaggtgctgatgcatctggaaaccgaactgatgggcaccgtgcgcgaacgtgcggaagatgaagcaatcaacgtctttgcccgtaacctgcacgatctgctgatggcggcccctgccggactgcgtgcaacgatgggcctcgatccgggtctgcgtactggggtaaaagtggcggtggtcgatgccactggcaaactggtggcgaccgacaccatttacccgcacaccggacaggccgcaaaagcagcgatgaccgttgctgcgctgtgtgaaaaacataacgttgaactggtagcgatcggtaacggtacagcttcccgcgaaactgagcgtttctatctcgatgtgcagaagcagttcccgaaagtgaccgcgcagaaagtaatcgtcagcgaagcaggcgcgtcggtttactcggcttccgagctggctgcacaggagttcccggatctcgacgtttcgctgcgtggcgcggtgtctatcgcccgccgtttgcaggatccgctggcggagctggtgaaaatcgatccgaaatctatcggcgtaggtcagtatcagcatgacgtcagccagacgcaactggcccgcaaactggacgcagtagtagaagactgcgtaaacgccgttggcgtcgatctcaacactgcttctgttccgctgttaacccgcgtggcgggcctgacgcgcatgatggcgcaaaacatcgttgcctggcgcgatgagaacggtcagttccagaaccgtcagcaactgttaaaagtgagccgtctggggccgaaagccttcgagcagtgcgcgggcttcttgcgcattaaccacggtgataacccgctggacgcgtctaccgttcacccggaagcctatccggtggtggaacgcattctggcagcaacacagcaggcactgaaagatctgatgggtaacagcagcgaactgcgtaacctgaaagcgtctgactttactgatgagaaattcggtgtgccgacggtaaccgacatcatcaaagagctggaaaaaccgggtcgcgatccgcgtccggaatttaaaaccgctcagtttgccgatggcgtcgagacaatgaacgacctgcaaccgggtatgatcctcgaaggcgcagtgaccaacgtcaccaactttggcgcgtttgtcgatattggcgtgcatcaggacggcctggttcacatctcttcattgtcgaacaagtttgtggaagatccgcataccgtggtgaaagcgggcgacattgtgaaggtgaaagtgctggaagtggatcttcagcgtaaacgtatcgccctgactatgcgcctggatgagcagcctggcgaaaccaacgctcgtcgcggcggcggtaatgaacgcccgcaaaacaaccgcccggcagccaaaccacgcggtcgtgaagcgcagcctgccggtaatagcgcgatgatggatgcgctggcggcggcaatgggcaaaaaacgttaaacgcccgtactggcctacggttcgaatttgcacgaaatcgtagggcagataaggcgttcaccgcatctggcaacgaacgccttgcctgacataaaagtgccggagaatatctccggcatttttattccacagccaaactcataatatattccggcaatatttatcatttcattaacaactgaaaccttaattaaacattagccagtccgggtaattcactattcgaattatattttcgctgcgatataaccttgagccacatcaacattgagtcagattattattcaaaccaacattcgcacacattttaagtattgctgatagaaaccattctcattatcattgtgttgttgattatttaatctctcctttgttggcaaatcatctggtctcatgtcgctgtcaaacgccccatgaggtagttatccagttaatgagaaacaagtaggcacctatgcaatacactccagatactgcgtggaaaatcactggcttttcccgtgaaatcagcccggcatatcgccaaaaactgctttctcttggcatgttacctggctcctcttttaatgtggtgcgcgtcgctccactcggcgaccccattcatatcgaaacccgtcgtgtgagcctggtattacgcaaaaaagatctggccttattagaagtggaagcggtttcctgttaatacggtgataacaacaatgaaaaaattaaccattggcttaattggtaatccaaattctggcaagacaacgttatttaaccagctcactggctcacgtcagcgtgtaggtaactgggctggcgttaccgtcgaacgtaaagaagggcaattctccaccaccgatcatcaggtcacgctggtggacctgcccggcacctattctctgaccaccatctcatcgcagacctcgctcgatgagcaaatcgcctgtcactacattttgagtggcgacgccgacctgctgattaacgtggtggatgcgtctaaccttgagcgtaacctgtacctgacgctacaactgctggaactcggcattccctgcattgtggcactgaacatgctcgacattgccgagaagcaaaatattcgtattgaaattgatgctctgtcggcgcgtctgggctgtccggtgatcccgctggtttcaacccgtggtcgcggtattgaagcgctcaagctggcgattgatcgctataaagctaacgagaatgtggaactggtgcattacgcacagccgctgctcaacgaagcagattcactggcaaaagtgatgccttccgacatcccgctgaaacaacgtcgctggctgggcctgcaaatgctggaaggcgatatctacagccgcgcctacgccggtgaagcgtcgcagcatctggatgccgccctcgcccgtctgcgtaatgagatggacgatccggcgctgcacattgccgatgcgcgttaccagtgcattgctgccatctgtgatgtggtaagcaacaccctgacggcagaacccagccgtttcaccactgcggtagataaaatcgtgctcaaccgtttcctcggtctgccgattttcctctttgtgatgtacctgatgttcctgctggctatcaacatcggcggggcgttacagccgctgtttgacgtcggctccgtggcgctatttgtgcatggtattcaatggattggctacacgctccacttcccggactggctgactatcttcctcgcccagggcctgggtggcggcattaacaccgtgctgccactggtgccgcagattggcatgatgtacctgttcctctccttccttgaggactccgggtatatggcgcgtgcggcgtttgtgatggaccgtctgatgcaggcgctgggcttgccggggaaatcctttgtgccgctgatcgtcggtttcggttgtaacgtaccgtcggtaatgggtgcacgtacgcttgatgcaccgcgtgaacgtctgatgaccatcatgatggcaccgtttatgtcctgcggcgcgcgtctggctatcttcgcagtattcgcggctgccttcttcgggcagaacggtgcgctggcggtcttctcgctgtatatgctgggtattgtgatggcggtgctgactggcctgatgctcaagtacaccatcatgcgcggtgaagcgacgccgtttgtcatggagttgccggtctatcatgtaccacacgttaaaagcctgattatccagacctggcagcgtctgaaaggcttcgttctgcgtgctggtaaagtgatcatcatcgtcagcattttcctgagcgctttcaacagcttctcgctgagcgggaaaatcgtcgataacatcaacgactcggcgctggcgtccgtcagccgggtgatcaccccggtcttcaagccaattggcgtgcatgaagataactggcaggcaacggttggcctgtttacaggtgccatggcgaaagaagtggtagtgggtacgctcaacaccctctacaccgcagaaaatattcaggacgaagagttcaatccggcagaatttaacctcggtgaagagctgttcagtgcgatagatgaaacctggcagagcctgaaagacaccttcagccttagcgtactgatgaaccccattgaagccagcaaaggcgacggcgaaatgggtaccggggcgatgggcgtgatggatcagaaattcggtagcgcagcagcagcttacagctacctgattttcgtcctgctgtatgtaccatgtatctcggtgatgggggctatcgcccgtgaatcaagccgtggctggatgggcttctccatcctgtgggggctgaatatcgcttactcactggcaacattgttctatcaggtcgccagctacagtcagcatccaacttacagcctggtgtgcattctggcggttatcctgtttaacatcgtggttatcggtctgctgcgccgcgcgcgtagccgggtggatatcgaactgctggcaacccgcaagtcggtaagcagttgctgcgcagccagcaccaccggtgattgccattaatggcttcacttattcaggtgcgcgatttgctggcgttacggggccgtatggaagcggcccagataagccagacattgaacactccacagccaatgattaacgccatgctgcaacaactggaaagtatgggcaaagccgtgcggattcaggaagaacctgacggctgcctctctggcagttgtaaaagctgcccggaaggaaaagcctgtctgcgcgagtggtgggcgctgcgttaaccttactccatcgcctgttttggaaagcccggtatgcgtctgcatccgggcttttttgcgtgcggctttccataaaaatgcaactcttgcagcacggcgtaagttcctttgaaagcatctcgcagggatgaaaactcgctaatacacaggtgtggagtggcgcgtagagtcgcggcattcaaacaacaggtgaaggaacgccatgagcaaaaagcagagttccaccccacacgatgcgctgttcaaactctttttacgccaaccggacacggctcgtgattttcttgcgtttcatttaccggcacccattcacgcgctttgtgatatgaaaaccctcaagctggagtcgagcagctttattgatgacgatctgcgtgaaagctattccgatgtgctgtggtcggtgaaaacggaacaaggaccaggatacatctattgtctgattgaacatcaaagcacctcaaacaaactgatcgcatttcgcatgatgcgttacgctattgccgcaatgcaaaatcaccttgatgctggatacaaaacgttgccgatggtggtgccattgttgttttaccacggtattgaaagcccctatccctattcgctgtgttggctggattgtttcgccgatcccaaactggcaaggcagctttatgcctccgcatttccgctgattgatgtcaccgtcatgcctgatgatgaaatcatgcagcaccgacgtatggcgctgctggagttaattcaaaaacatattcgtcaacgcgacctgatggggctggtagagcaaatggcctgcttattaagtagtggatacgctaatgacagacaaatcaaagggctgtttaattacatactgcaaactggcgacgctgtacgttttaacgattttatcgacggcgttgccgaacgttcaccgaaacacaaggagagtttaatgactattgcggaaagattgcggcaggagggggaacaatccaaagccctgcatatagccaaaataatgcttgaatccggagttcctcttgcagacatcatgcgctttaccgggctgtcagaagaagagttggctgcggcgagtcagtaaagttctgtctcgccatttcaaaagccacctacaccctctgcttcaacgccaccagcaggtgacaaaactcggccggatgcgaaataaatggcgcatgggccgctttggcgaagatatatgattcgctgtgaggccaaagtttatccagcatcggcaccactttgcgcggcaccagaccgtcgagatagccatacaatcgcaaaaacggcatggacacgttttgcagcggctgacggagatcgaccgttttcaggatttccagcccgccattaagcacgtcaacctccggcatcggtaacgccagaacggttttcttcaacgcccgcgcatcctggcgcgccgtttcagtccccatggtttgtaacgccaggaaccgctccactgtacgctgaaaatcatcactgagttgctgctgaaatcccgccagcacgtccggttttatccccggccactcgtcacgagcactaaaacaaggtgacgacgccacggtgaccagcgcctgaacacgctcgggatgggttaacgcaatctggcttgccaccagcccgcccagactccagcctaaccaaatggctttatcaggtgcctgttgcagcacggcttcggccatatcagcaagtgacagcgcaccaaatccccggctacgcccgaagccgggcaggtcaacaaggtgcagcgtaaaatgcgagctaagttcctcgtcaatgcaacgccacacttcggcattcagtccccatccgtgcagcagcacaagatgaacattcccctgacctttggtctgccaccagatgttattcatccgctattgttctcttttgacttacaaggatgaacatatgctaacagtaccgggattatgctggctatgccgaatgccactggcgttaggtcattgggggatttgttcggtctgttcacgcgccacccgcacagataaaacgttatgcccacaatgtggattacccgccacacactcccatcttccctgcggtcgctgcctgcaaaaaccgccgccctggcaaagactggtcacggttgccgactatgcgccgccgttaagtccgcttatccaccagcttaaattttcccggcgcagtgaaatcgccagcgccctgtcacgtctgttactattggaagtcttacacgctcgtcgcaccaccgggttgcaattgccggatcgcatcgtcagcgttccgttatggcagcggcgtcactggcgtcggggatttaatcagagcgatttgctgtgtcagccgttatcacgctggttgcactgccaatgggatagcgaagccgtcacacgtacacgggccactgcgacccagcattttctcagtgcccggctgcgcaagcgcaacctgaaaaatgcctttcgtcttgaattgcccgtgcaaggtcgccatatggtgattgtggatgatgtcgttaccaccggaagtaccgtcgcagagattgcgcagttgcttttacgcaatggtgcggcggctgtccaggtctggtgcctttgtcgaaccttgtagagcctcgatgatgggcgtattataaccaactaaaatagtcaactattaggccattactatgatccgtatttccgatgctgcacaagcgcactttgccaaactgctggcaaatcaggaagaagggacacaaatccgcgtatttgtgattaaccctggcacgcctaacgctgaatgtggcgtttcttattgtccgccggacgctgtggaagccaccgacacagccctgaaatttgacctgctgaccgcgtatgttgatgagttaagcgcaccatacctggaagatgcagagatcgattttgttaccgaccagttgggttcccagttaacgctgaaagccccgaacgccaaaatgcgtaaagtggcagacgatgcaccgctgatggagcgcgtggagtatatgctgcagtcgcagatcaacccacagcttgctggtcacggtggtcgcgtttcgctgatggaaatcaccgaagacggttacgccattctgcaatttggcggcggctgtaacggttgttccatggtcgatgtgacgctgaaagaagggatcgagaagcagctgctgaacgaattcccggagctgaaaggtgtgcgcgatctcaccgaacaccagcgcggcgaacactcctactactaagttatcccctcttttgtagattgcccgatgcgacgctaaagcgtcatttcgggcctacgttgaacatgtgccagacgttggcgcagcattgctttgtcaaatcctcggttcgtttccccgcgataatatgaccaacctctcataatttaaatttaccccgctctggtgattctcaaacgccagatgttacccgtatcattcacatgggtaccaaacatactcctgacatctgactacaataattagttttagtgggtatcagtcgtggtgccgcaatatctctgttcccgattgggataattagagtttgtcgtcagaaaattgacgttacccataacaaatgaaaggccaggtaaatcatgccattagtcattgttgctatcggtgtaatcttgttgttgctcctgatgatccgcttcaaaatgaacggcttcatcgctctcgtcctcgtggcgcttgctgttggattaatgcaaggaatgccgctggataaagttattggctccatcaaagccggtgtcgcggacgtcggtagccttgccctgatcatgggttttggcgcaatgctgggcaaaatgctggcagactgcggtggcgcacaacgtatcgccaccacgctgattgccaaatttggtaaaaaacacatccagtgggcggtggtactgaccggttttaccgttggttttgccctgttctatgaagtgggctttgtgctgatgctgccgctggtgtttaccatcgcggcttctgcgaatattccactgctgtatgttggtgtaccaatggcggctgcactgtctgtgacccacggcttcctgccaccgcatccgggtccgactgcgattgccaccattttcaatgccgatatgggtaaaaccctgctgtacggtactattctggcaatcccgaccgtgattctcgccggtccggtttacgctcgcgtgttgaaaggtatcgataagccaattccggaaggtctctacagcgcgaaaaccttcagcgaagaagagatgccgagctttggcgtcagcgtctggacctctctggtgccggtagtactgatggcgatgcgtgcgattgccgaaatgatcctgccgaaaggtcacgctttcctgccggtagcggagttcctcggtgacccggtaatggcaacgctgattgccgtgctgattgcgatgttcacctttggtctaaaccgtggtcgttcaatggatcagattaacgacacgctggtttcttccatcaaaatcattgcgatgatgctgttgatcatcggtggtggcggtgcgttcaagcaggtgctggtagacagcggcgtggacaaatacattgcttccatgatgcacgaaaccaacatttctccgctgctgatggcctggtcgattgctgccgtactgcgtatcgcgctgggttccgcaaccgttgcggcaatcactgcgggtggtatcgcggcaccgctgattgcaacgacgggtgttagcccggagctgatggttattgcggttggttccggtagtgtgattttctctcatgtgaacgatccgggcttctggctgttcaaagagtactttaacctgactatcggcgagaccatcaaatcctggtcgatgctggaaaccattatctcggtgtgcggtctggtaggctgtctgctgctgaatatggtgatttgataacactgactgccggatgcggcgtgaccgccttatccggcctacgattcgggatgaattagtaggccggataagacgcgtcaagcatcgcatccggcatcaaccgcactctacttcttcttcgctgcagctctgcgccgtctgtccaaatccttcagcaacttgttcacgccatcatcggcaaacatcgactcaagcgttgcggaaagcttgcgtcgccagtttttatactggtaactggtgccaggaatattcaccggttcggccatatccagccagtcttccggctgtagtcctaacagagcactgttactgtcggcaatgtagcgctgcaaaccacggttcagcgtcggcgtcatcgacatcaacgatgccttatgcccggcacgtttcggcagacaaccatatttatgcagtgcatccagcagcccttgcttcgccagttcgcgatcctgatacagaccgcgcagtaccacttcatccggatacagccccagggttttgcccagcgttagatccccgcactcccagtaaccgcgcagcgttggcaggtcatgtgtcgccgcaaccgccatcgactgctccggatacgctttcggtgcacggaacgtcttctcgtggtcgttttcgaaatagagcactttgtaagagtacacaccgctgctgcgcagcttaccgacaatctctaccggtacggtaccgagatcttcaccaatcaccatacagcgatgacgtttactttcgagtgccagaatcgagagcagatcatccaccggatagtgaacatacgcgccctgatctgccgtctcgccatacggtatccaccacaaacgcagcatcgacatcacatggtcaattcgtaatgcgccgcagttttgcatattggcacgcaacagctcgataaacggttcataggcacgcgcggtgatgatatgcgggtccattggcggtaatccccagttctgccccaacgggccgaggatatccggcggcgcgccaaccgatgctttcaggcaatatagttcacggtcacaccaggtttccgccccaccttccgctacgccaaccgccagatcacgatacaagccaatcggcatttcatagccctggcttatctcccagcaggcggcaaactggctgtaagccagccactgcaaccagagataaaaatcgacgtcatcacgatgttcttcgcagaactgacgcacttctggtgaatccacgttctgatacatctctggccatgcaggccagccccagcgcatttcgtcctctttcacttgctgggcatgtagcgcatcaaaggctgcctgccagaacaggctgtcgccctgctctgcaacaaactggcgaaacgcggccatctgctcatcatcacgttgcgcgaaacctttccacgccattcgtaatgctgtcatttttagggcggtaaccgtggagtaatcgacccagtcggcatcgcgcgcctgttgcagcgtctgttgcgtggtcggcaactgccaccaggcctgagcctcttcgctaagatggaaatcttcaacggcgttaacgtcgatataaatcacattcagccaacggcgagaagacgggctgtatgggctggcgctctccggatttgccggatagagcgcatgaatcgggttcaggccaatgaacgacccgccacgttttgccacatccaccagcatcgctttgagatcgccaaaatccccaataccccagtttttttccgatcgcagcgtataaagctgaacgcaggcaccccacagcttttgtttattcagcaacgcctgcggttcgtaacagcgtttcggggcgacaatcacccggcaatgcgcgcgctggtcgtcctgggtgagtgtcagcgtgtgataaccttccggcagcttcgtcggtagattgaacgctttgccccccgttacatggcctttgtactgcgttccttcttcggtggtcagcagccagctatattcgccgctgccctccaccaccatcggcatttttttgccgctggtataaaccatgacattcgggactggcgttaccgccactttcgtggcggtacgttgatgcatcgcgtcaagcaaacgccgtttggtttcggcgctaatcgactgcggtttaccgtgggcattgatgtaattggggctaatccccgccgccagcgcggcattatccagacgtttgctttccatcgagcttccttagcgttttgcctgccagatacgagcctgataatcgcgaatagagcgatccgagctaaacataccgcagcgggcggtattgaggatcgccgcgcgagtccaggcctcctggtcgcggtacagcacatccacctgcttttgtgcctctacataggctgcgaaatccgccatcaccagatacggatcgccgccctgtttgccgatactgtgcagcatctggtcgaaggcatgcttatcgccgtcgctgtatttaccgctttccagctctttcaatactgcgtccagcaccttacctttcttccgccatttcaccgggtcgtagcctttggccagaattgccttcacttgttccacggtatgaccaaaaataaagatattttcttcaccgactttctcggcgatttcaacgttcgccccatccagcgtaccgacagtaagcgcaccattgagcgccagtttcatattgccggtaccggaagcttctttacctgcagtcgaaatttgttcggagatatccgccgccgggatcagtttttccgccgccgaaacgcaataatccggcaggaacaccaccttcaacttatcgccaaccagcggatcgttgttgatcacgtcagccactttgttgatcgcaaagataatattcttcgccaggtagtagcccggtgccgctttcgcgccgaagaggaagacgcgcggtacgcgatcagcctgcgggttttcacgaatttctttgtacaacgccagaatatgcagcagattcaggtgctggcgtttgtactcatgcaaacgtttgatctgaatatcgaaaatcgcctgtggattgatctcaataccggtacgaactttcacaaactccgccagacggactttattcgcctgcttgatctcgcgatattgctgacggaatttcgcatcatcagcgaatttttccagattgatcagctgatcgagatcgttagcccactctttttgcagtgatttatccaacagagccgccagtgccgggttgcactgtttgatccagcgacgtggggtaataccgttggtgacgttatggaatttgttcggccatagctggtgatattccgggaacagatctttcaccaccagatccgagtgcagcgccgcaacaccgttcaccgcgaaaccgccaaccacacacaggttcgccatatgcacttgtttgtcgtgcaccaccgccagtttggcccacactttttcatcgcccggccaggttttctctaccagcgttttaaagcgagtattaatttcgttaataatctgcatgtggcgcggcagtaagcctttcaccagtttcacatcccagcgttccagcgcttctggcatcagggtatggttggtgtaagcgaaagttttgctggtaatggcccaggcgtcatcccagctcatctggtgctcatcgatcagcacgcgcagcagttctggaatcgcgatagttgggtgggtatcgttcagctgaataacttcgtaatccgccagttcgtgcagtttacgccccgccagatgatggcgacgcaaaatatccgctaccgaacaggcacactggaagtattgctgcatcaggcgcagctttttaccggcagtatggttgtcgtttggatagagaactttggtcagtttttccgcattgatgccctgctgttcggcacgcaagaaatcaccgtcgttaaatttagtcagatcaaacggatgcgcgtgcgtcgcctgccacagacgcagcggctgcgccacgccattacgatagccgacaacggggagatcccacgcttgaccggtaatggtaaactccggctcccagcgtccgtctttcgtcactttaccgccaatccctacctgcacatccagtgcttcgttgtggcggaaccacgggtagttactgcgatgccagtcatccggcgcttcaacctgtttgccatcgacaaaagactggcggaacaaaccatattgatagttcagaccgtaacccgtcgcagactgaccgacagttgccattgagtcgaggaagcacgccgccagacgtcccagaccaccgttacccagcgccgggtcgatctcttcttccagcaggtccgtcagattgatgtcataagccttcaacgaatcctgtacatcctgataccagccgagattcaacaggttgttgcccgtcaggcgaccaatcaaaaactccattgagatgtagttaacatgtcgctgattcgccaccggcttggcgaatggctgagcacgcagcatttcggccagtgcttcactcactgctagccaccactggcgaggagtcatttcagccgcagaatttaagccataacgctgccactgacgtgaaagcgcttcctgaaattgcttatcgttaaaaataggttgtgacataggagttccacttttcttagattttcaacacaacgttatcgctagtttgccaggctcgatgttgaccttcctcatcctgcgggggattaggcagggaggagttgcggggatgagcaaggaaatgtgatctcaaccacttaaagctagtgcaaaccacaggattagcatcaaatcaatgcaatacagcgcagaaaatctgtatctaagtgcaaaaaatggccgttgcgtattttcaaaaagcggaaggtaactctataaattaagtaaaggagtgaaacagtttcataagtaaaatatccagtgtgctccatctcattcttaatagatttattaagatcatctttttagatggcactttcatcaggaatgaagaagaaacccttgcttaaatgaatctgatgaacataagggaaaccagtattcacgctggatcagcgtcgttttaggtgagttgttaataaagatttggaattgtgacacagtgcaaattcagacacataaaaaaacgtcatcgcttgcattagaaaggtttctggccgaccttataaccattaattacgaagcgcaaaaaaaataatatttcctcattttccacagtgaagtgattaactatgctgattccgtcaaaactaagtcgtccggttcgactcgaccataccgtggttcgtgagcgcctgctggctaaactttccggcgcgaacaacttccggctggcgctgatcacgagtcctgcgggctacggaaagaccaccctcatttcccagtgggcggcaggcaaaaacgatatcggctggtactcgctggatgaaggtgataaccagcaagagcgtttcgccagctatctcattgccgccgtgcagcaggcaaccaacggtcactgtgcgatatgtgagacgatggcgcaaaaacggcaatatgccagcctgacgtcactcttcgcccagcttttcattgagctggcggaatggcatagcccactttatctggtcatcgatgactatcatctgatcactaatccagtgatccacgagtcaatgcgcttctttattcgccatcaaccagaaaatctcaccctggtggtgttgtcacgcaaccttccgcaactgggcattgccaatctgcgtgttcgtgatcaactgctggaaattggcagtcagcaactggcatttacccatcaggaagcgaagcagttttttgattgccgtctgtcatcgccgattgaagccgcagaaagcagtcggatttgcgatgacgtttccggttgggcgacggcactacagctaatcgccctctccgcccggcagaatacccactcagcccataagtcggcacgccgcctggcgggaatcaatgccagccatctttcggattatctggtcgatgaggttttggataacgtcgatctcgcaacgcgccattttctgttgaaaagcgccattttgcgctcaatgaacgatgccctcatcacccgtgtgaccggcgaagaaaacgggcaaatgcgcctcgaagagattgagcgtcaggggctgtttttacagcggatggatgataccggcgagtggttctgctatcacccgctgtttggtaacttcctgcgccagcgctgccagtgggaactggcggcggagctgccggaaatccaccgtgccgccgcagaaagctggatggcccagggatttcccagcgaagcaattcatcatgcgctggcggcaggcgatgcgctgatgctgcgcgatattctgcttaatcacgcctggagtctgttcaaccatagcgaactgtcgctgctggaagagtcgcttaaggccctgccgtgggacagcttgctggaaaatccgcagttggtgttattgcaggcgtggctgatgcaaagccaacatcgctacggcgaagttaacaccctgctagcccgtgctgaacatgaaatcaaggacatcagagaagacaccatgcacgcagaatttaacgctctgcgcgcccaggtggcgattaacgatggtaatccggatgaagcggaacggctggcaaaactggcactggaagagctgccgccgggctggttctatagccgcattgtggcaacctcggtgctgggtgaagtgctgcactgcaaaggcgaattgacccgctcactggcgctaatgcagcaaaccgaacagatggcacgccagcacgatgtctggcactacgctttgtggagtttaatccagcaaagtgaaattctgtttgcccaagggttcctgcaaaccgcgtgggaaacgcaggaaaaagcattccagctgatcaacgagcagcatctggaacagctgccaatgcatgagtttctggtgcgcattcgtgcgcagctgttatgggcctgggcgcggctggatgaagccgaagcgtcggcgcgtagcgggattgaagtcttgtcgtcttatcagccacagcaacagcttcagtgcctggcaatgttgattcaatgctcgctggcccgtggtgatttagataacgcccgtagccagctgaaccgtctggaaaacctgctggggaatggcaaatatcacagcgactggatctctaacgccaacaaagtccgggtgatttactggcaaatgaccggcgataaagccgccgctgccaactggttgcgtcatacggctaaaccagagtttgcgaacaaccacttcctgcaaggtcaatggcgcaacattgcccgtgcacaaatcttgctgggcgagtttgaaccggcagaaattgttctcgaagaactcaatgaaaatgcccggagtctgcggttgatgagcgatctcaaccgtaacctgttgctgcttaatcaactgtactggcaggccggacgtaaaagtgacgcccagcgcgtgttgctggacgcattaaaactggcgaatcgcaccggatttatcagccattttgtcatcgaaggcgaagcgatggcgcaacaactgcgtcagctgattcagcttaatacgctgccggaactggaacagcatcgcgcgcagcgtattctgcgagaaatcaatcaacatcatcggcataaattcgcccatttcgatgagaatttcgttgaacgtctgctaaatcatcctgaagtacctgaactgatccgcaccagcccgctgacgcaacgtgaatggcaggtactggggctgatctactctggttacagcaatgagcaaattgccggagaactggaagtcgcggcaaccaccatcaaaacgcatatccgcaatctgtatcagaaactcggcgtggcccatcgccaggatgcggtacaacacgcccagcaattgctgaagatgatggggtacggcgtgtaagtttagccggataacgcgccagatccggcttacatctctgcatcattcaatgctcacccgcgttacgccatctgtttctatcaaactaaaccgcaccggcaagaaacgctccaccaccgcgatattggtcagcagatggcatgagggatgggcgaccgtaaattcccccgcgcccgccagcgccatcggtagcaccagttggtcagcaagatattcccccaccgccgccgtgcttgccaggtagcgtttcacctctttcaccaactgtgccgcaaccacctcggcactgacgcgcttttcaccgacgacaaaaaagcgttcggtgatattttcactttcgacttcaagcgagacggtattacccggcccctggtcgcgcggcaggttatgaatattctgttcatgcagggaaaaactccccgccagtgtagcgatttcacgctcagcaacatggcgcggcacaccagctaatagaacttctccacgcatctgcacaatgttcccgcgctcgccaagttgcaaggtgttaaacgatgccacgggcgagacttccgttgccaccacaccgcctccggcagggtaaaaaccgtggcgtaacagcgtggtttgctgatgaattcctattttcgccagcagcggctccagcacccggcggataaaatccgaggcggcgccgacgggttatcggtcgccgcgctcacttcaacacgcgaaggtccatcggcaaaccacagcgcgggcagcaccgtttgcagcaccagcgtacaacttccggcgctaccgatagcaaagcggtaatcgccgccgcgcacggtgccgggccggaagagcagacgctgcgaccccagctccgcgccttccacggttgctccgcaaatttccgtcgccgcctttaccgcggtcagatgctggcgcaacagccccggtttcgcccgcccggcacgaatgctggtgatggtaaatggctggccggttatcatcgacaggctcagcgccgagcgcaggatctgcccgccaccttcgccctgtgcgccatccagcgcaatcatccttttcatcatttatccttttacgcacaccacctgacgcagggtatagataacttccaccagatcgctttgtgccgccatcaccgcatcaatatctttatacgccatcgggatttcgtcgatcacttcggcatctttacggcattccacatgcgcggtggcacgaatttgatcttccacgctgaacagttttttcgctttagttcggctcattacccgcccggcaccgtggctgcacgaacagaacgactcttcatttcccagcccacggacgataaagctttttgctcccatcgaaccgggaataattccatattgaccagcacgcgcagacaccgcgcctttacgcgtcacgtagatctcttcaccaaagtgctgttctttttgcacatagttgtggtgacagttgatctcttccatcgccagcgtttgtggctgtctgaccgttttctgcgtaatgctctgcaatgccgttaccacgttttccatcatcgcatcgcggttaaggctggcaaaaagctgcgcccaggccacggctttcaggtaatcatcaaagtattccgtaccttccataaagtacgccagatcacgcgacggcaacgtctcaagcgtttcctgcatctctttttgtgccagatcgataaagtaagtcccgatggcgttaccaattccgcgtgaaccggagtgcagcataatccacacctggtccgactcatcaaggcagatttcaataaagtggttaccggttcccagcgttcccaggtgtttatagttattggtattcaggaaacggggatatttttgcgttaaccactgataaccggcttcaagctcagcccatttagcatcgacgttaacaggtggattttcccaggcacctttatcacgtttacaacggccagtggtacgcccgtgcggcacggccgtttcaatcgcctgacgcagctctgccaggttttcaggcaggtcttccgccgttaacgcggtacgcagcgcgttcattccacagccaatatccacgcccaccgccgccggaataatcgcccctttggtcgggatcacgctaccaatggtggaacctttacccaggtgtacatcaggcattaccgcaatatgtttgaaaataaacggcatcttcgccgtattaataagttgctgacgcgcatcggcctctaccggcacgcctttggtccacatttttaccggggcattttcagtggtcagtaattcgtaattcattttgtttttctcttttcgttgtttgctgtcctgataattgcaaccgtcgtgccagaaaattaaataagcagcttaattttttaattcattgttttaaaaaagattatatctttacgtccgtaaccggagatttcccgcaaagccaatttaccgataatgaaatatcgtcttttataaggatatctaagatgcgtaaaacagtggcttttggctttgtcggtaccgtactggattatgccgggcgcggcagtcagcgctggtcaaaatggcgtccgacactctgtttatgccagcaagaatcgttggtcatcgatcgactggaattgttgcacgacgcccgctcgcgctcgctatttgaaacgcttaaacgcgatatcgccagcgtttcgccagaaacagaagtggtgagcgttgagattgaactgcataacccgtgggatttcgaagaggtctacgcctgcctgcatgatttcgcccgtggttacgagtttcagccagaaaaagaagactatttaattcacatcaccaccggtacccacgtcgcgcagatttgctggtttctgctggcagaagcgcgttacctgcccgcccggctgatacaatcttcacctccgcgcaaaaaagaacagccgcgcggcccaggtgaagtaacgattatcgatctcgatttaagccgttataacgccatcgccagccgctttgccgaggaacgccagcaaacgcttgattttcttaagtccggcattgccacgcgtaacccccacttcaaccgcatgattgagcagatcgaaaaagtggcgatcaaatcccgcgcgccgattctgcttaacggtccaaccggcgcgggcaagtcatttctggcgcgacgcatcttagagttaaaacaggcgcggcatcagtttagcggcgcgtttgtggaagtgaactgcgccaccctgcgcggcgataccgccatgtcgacgctgtttggtcatgtaaaaggcgcgtttaccggggcgcgggaatctcgtgaaggtttattacgcagcgccaacggcggaatgttgtttcttgatgagattggcgaactgggcgcagacgaacaggcaatgctgctgaaagccattgaagagaaaaccttttacccgtttggcagcgatcgccaggtgagcagtgattttcagcttatcgccggaacggtgcgcgatttgcgccagctggttgccgaaggcaaatttcgcgaagatctgtacgcgcggatcaatctctggaccttcaccctgccgggtctacgccagcgccaggaagatattgaaccgaacctggattatgaagtggagcgccacgcctcactcactggcgacagcgtgcgttttaacaccgaagcgcggcgcgcctggttggcttttgcgacctctccccaggcaacatggcgcggtaactttcgcgaactttctgccagcgtcacgcggatggccacctttgccactagcggacgcatcactctggacgtggttgaagatgagataaaccgtctgcgctataactggcaggagagccgcccctccgcgcttacggcgttgctgggcgcagaggcagaaaacatcgatctcttcgaccgtatgcaactggaacacgttatcgctatctgccgccaggcaaagtcgctttccgcagccggacgccagctttttgacgtttcgcgccagggcaaagccagcgtcaatgacgcggatcggctacgcaaatacctggcgcgttttggtctgacgtgggaagccgtgcaggatcagcacagctccagttgaatatggtggtccgtcagcacctgcatcacgcttactggcggcggggcgtcggtgtagacggcatctaccatgctgatgctgcccatattgaccatcgcgttacggccaaatttcgagtgatcgacaaccagcataacgtggcgcgagttctcaataatggcgcgtttggtgcgaacttcgtggtaatcgaactccagcagcgagccgtcgctatcgatgccgcttatccccagaatgccgaaatcaaggcggaactgggagataaaatcgagcgtcgcttcgccaatgatcccgccatcgcggctgcgtaattcgccaccggcgagaatgatgcgaaaatcttcttttaccatcaacgtgttagcaacgttgagattgttggtgacaatgcgcaaattgctgtgattgagcagtgcgtgcgctaccgcttccggcgtggtgccgatatcgataaacagcgtcgagccattggggatttgctccgccactttgcgggcgatgcgctctttttcttcggtctgggtggccttgcgatcgtgccacggcgtgttaaccgaactggaaggcagcgccgcaccgccatgatggcgcaggatcaggttttgctccgccagctcattgaggtcgcggcgaatagtctgcgggctgacggagaaatgctctaccagctcttcggtactgacataaccctgctgtttaaccagttcgataataccgttgtgacgttgtgtttgtttcatttataaatccctggaattattttcgttttcgcgcattgagcgaatcaacaaaagccatcgctaaacccacggctaacccggcgatgtgtgctccgttcgccatcgacatcccaaacaaatcaaaccatccggcgacaatccagatcagcgcaaagataattaacccacgttgcaggtaaatgccactttgcggatcgcgttcgccacgtagccagacgtagcccatcagcgcatacaccacgccagaaagcccgccaaaccacggcccgctgaatttttgctgcacatagccgcttaacagggcgctgataagcgtaatgacaattagcttaccgctaccgaggcgtttttccaccgcaccgccgagataccaccaccagagcaggttaaagaggatatgcatcagcgagaagtgcattaacgcgtgggtgaagtaacgccagaactcaaatttcagtgttggatcgaatggccaggccagccataacatcacttcctgatcgccgagaatttgcatggcaataaacaccaccacgcaggcgatcatcatcacccaggttaccggacctgcgcgttcacgcaaggcggcaaagaaaggataacggcgataatgcaggccactgccggtatggcctgcctgccagctcgccgccagataacgcggatctgccgggttttcgagaaaacgcgccacgtccgcccgtacgcgctcggcctgggactcatccgccagccagacatcgctttggttatgttgttgaatcgtgaggataacaccctgcgtcgccatgtaatcaacaaacgcctgcgccacgcgggggttagcaaaagaggtaatcatcaacatcgttgctgtcgcttattccacacaaaaggggacagtataaagcgttacgcgccgtacgccacctctgcgggaaactgacgttgccaggcttcaaagccgccgtcaatgctatagaccacatcgtagccctgttgcagcagatactgcgccgcgcctttgctgctattgccgtgataacacatcaccatcaccggagtgtcaaagtcgttatcacgcataaaagcgcccagcgtgtcgttggttaaatggaaagcctgcaccgcatgtcccattgcgaaactctgtggatcgcgaatatcgaccagcaccgcctctttttcctgcaacttctggtgcgcgtcggcaacgttaatacattcgaactgatccatgcgtctctctttctttacaaacaagtgggcaaatttaccgcacagtttacgtcgaagcggcagataaacgccataatgttatacatatcactctaaaatgttttttcaatgttacctaaagcgcgattctttgctaatatgttcgataacgaacatttatgagctttaacgaaagtgaatgagggcagcatggaaaccaaagatctgattgtgatagggggcggcatcaatggtgctggtatcgcggcagacgccgctggacgcggtttatccgtgctgatgctggaggcgcaggatctcgcttgcgcgacctcttccgccagttcaaaactcattcacggtggcctgcgctaccttgagcactatgaattccgcctggtcagcgaggcgctggctgaacgtgaagtgctgctgaaaatggccccgcatatcgccttcccgatgcgttttcgcctgccacatcgtccgcatctgcgcccggcgtggatgattcgcattggtctgtttatgtacgatcatctgggtaaacgcaccagcttgccgggatcaactggtttgcgttttggcgcaaattcagtgttaaaaccggaaattaagcgcggattcgaatattctgactgttgggtagacgacgcccgtctggtactcgccaacgcccagatggtggtgcgtaaaggcggcgaagtgcttactcggactcgcgccacctctgctcgccgcgaaaacggcctgtggattgtggaagcggaagatatcgataccggcaaaaaatatagctggcaagcgcgcggcttggttaacgccaccggcccgtgggtgaaacagttcttcgacgacgggatgcatctgccttcgccttatggcattcgcctgatcaaaggcagccatattgtggtgccgcgcgtgcatacccagaagcaagcctacattctgcaaaacgaagataaacgtattgtgttcgtgatcccgtggatggacgagttttccatcatcggcactaccgatgtcgagtacaaaggcgatccgaaagcggtgaagattgaagagagtgaaatcaattacctgctgaatgtgtataacacgcactttaaaaagcagttaagccgtgacgatatcgtctggacctactccggtgtgcgtccgctgtgtgatgatgagtccgactcgccgcaggctattacccgtgattacacccttgatattcatgatgaaaatggcaaagcaccgctgctgtcggtattcggcggtaagctgaccacctaccgaaaactggcggaacatgcgctggaaaaactaacgccgtattatcagggtattggcccggcatggacgaaagagagtgtgctaccgggtggcgccattgaaggcgaccgcgacgattatgccgctcgcctgcgccgccgctatccgttcctgactgaatcgctggcgcgtcattacgctcgcacttacggcagcaacagcgagctgctgctcggcaatgcgggaacggtaagcgatctcggggaagatttcggtcatgagttctacgaagcggagctgaaatacctggtggatcacgaatgggtccgccgcgccgacgacgccctgtggcgtcgcacaaaacaaggcatgtggctaaatgcggatcaacaatctcgtgtgagtcagtggctggtggagtatacgcagcagaggttatcgctggcgtcgtaaattaacgtaaggtgatcaggtcagatttcaatctggcctgagactgatgacaaacacaaaactgcctgatgcgctacgcttatcaggcctacgtggtttatgcaatatattgaatttgcatggtcttgtaggccagataagacgttcacgtcgcatccggcatgaacaaagcgcactttgtcaaaaatctaacctactttttaattcagggaattaccgcaaagcccacgccatcatacccaacgtaacaaaactcaggcacgttccccactcgccccgagaaaaatagcattaatgcgcccagcgccagcataaaaattttgagcagaaggtaaattgttggcgtgataaggatattacaaacttcaataataccggcaagtccgacacccagcatggcaataaccaccgccaaaaattgcgccagtatggggatgccgaaaaaagtcattaccagcgaggtcaaaatccattttctgttttgcattattctttccattctttttgaatggtgaaattatactccccgagtccccttgccccttctggacacttttccgaaatgatggcggaaaaaaacgggaccctttggccccgttctatttattggtgaacttacaatctcaccggatcgatatgccagatatgatcggcgtactctttgatagtacggtcagaagagaagtagcccatattggcaatgttcagcatcgcttttgcggtccactcttcctgaagctcgtagagttcatcgactttatcctgacaatcgacatagctgcgataatccgccagtacctggtagtgatcgccgaagttgatcagcgaatcaaccagatcgcgatagcgacccggatcttccggactgaatacaccgctgccgatttgcgtcagcacctgatgcagctcctcatctttctcgtagtattcacgcggtttgtagccctgacgacgcagttcttccacttcttccgctgtgttaccaaaaataaagatattgtcagcaccgacatgatccagcatctcgacattcgcaccgtccaacgtaccgatagtcagcgcaccgttaagcgcaaacttcatgttactggtgccggaagcttccgtccctgccagcgaaatctgttcagacagatctgccgccggaatgatcaactgcgccaggctaacgctgtagttcgggatgaacacgactttcagcttatcgccaatctgcggatcgttgttgatcactttcgctacgtcattgatcaaatgaataatgtgcttcgccatgtaataggccgaagccgccttaccgccaaaaatattcacgcgcggtacccacttcgcatccgggtcggccttgatgcggttatagcgggtaatcacatgcaacacattcatcaattgacgtttgtattcgtgaatacgtttgatttgtacatcgaacaacgcctttggattcaccaccacattcagctgctgggcgatatactctgccagacgctttttgttctccagcttcgcctgatgcacagcgtgattaaccattgggaaatcacagtgttgttgcagctcattaagcaggctaaggtcggtgcgccagttacggcccaggtgttcgtccagcacggctgaaagcgatgggttcgctaccgccagccagcgacgcggcgtcacaccgttggtgacgttggtgaaacgacccgggaagattttcgcaaagtcggcaaacaacgattgcaccatcagattagagtgcagttccgatacaccgttaactttgtggctcacaacaaccgccagccaggccatacgcacacgacgaccgttggattcatcaatgatcgacgcccgtcccagcagatcggtatcgttcggatactgttcctgcaaggttttcaggaaatagtcgttgatttcaaagatgatctgcaggtgacgcggcagaattttacccagcatatcaaccggccaggtttccagcgcctcgctcatcagcgtgtggttagtgtaggagaagacctgacaacacacctcaaacgcgtcgtcccagctaaattggtgctcatcgatcagcagacgcatcatctcaggaatcgacagtaccggatgggtatcattgagatgaatcgcgattttatccgccaggttatcgtaggttttatgcaactgataatggcggcttaaaatgtcctgaatggtcgaggaaaccaggaagtattcctgacgcaggcgcagctcacgcccggagtaggtggagtcatccggatacagtacgcgagatacgttctcggagtggtttttatcttccactgccgcgaagtagtcaccctggttgaatttaccgaggttaatttcgctactggcttgcgcactccacaaacgcagcgtgttggtcgcgtcggtgtcgtaaccagggattatctgatcgtaagcgactcccagaatctcttcggtttcaatccagcgcgtttttttaccttcctgctgaatgcgaccgccaaaacggactttatagcgcgtgttgtggcgtttgaattcccacgggttaccgtattccagccagtagtctggcgactctttctggctaccgttaacgatgttctgcttgaacataccgtagtcatagcggatgccgtaaccgcgccccggcaaccctaacgtcgccagagaatcaaggaagcaagccgccagacgtcccaggccaccgttaccgaggcctgggtcattttcttcatcaatcagctcttcgagatttaaccccatcgcttccagtgcgccctgtacatcttcgtaaattcctagcgacaacatggcgttggagagcgtacggccaatcaaaaactccatcgacaggtagtaaacctgacgagtttcttgcgacaactgggcacggtttgaacgtaaccagcgctccacgagacgatcgcgcacagcaaataacgttgcgttcagccattcatgtttattggcgacgaccgggtcctttccaatcgtaaacatcagcttgtaagcgatagagtgcttaagagcttctacgctaagcgtgggcgatgaatatgtaaacggagcattcatataggcgtttcctgaaaactatttcaagcgatagtaaagctcacggtacgacttcgccgcgacctgccagctaaaatccattgccatagcctgacgttgcacaaaccgccacagtgaaggacgggaccacagtacaaaagcacgtcgaatagcccgtaacagcgaccaggcattactatcttcaaagacaaacccactggcgacgccatctgcaaggttctcaagagaacagtcagaaaccgtatcagcaagcccaccggtgcgccgcactaacggcagcgtaccgtacttcaatccataaagttgcgttaagccgcacggttcaaaacggctgggcaccagaatgacgtccgcgccgcccataatgcgatgcgaaaatgcttcgtgatagccaatctgaacgcccacctgaccggggtattccgctgccgccgcaaggaaaccttcctgcagcaccggatcgcccgcgccgagtagcgccagctgcccgccctgctccagaagacccggtaaggcttccagcaccaggtcgagacctttctggctggtcagacggctcaccactgcaaaaagcggcactttatcgtcaaccttaagccccattgcgatttgtaactggcgcttattttccgctttatcttccaacgtatcgcgggtgtaacgcgaggccaacagtaagtccgtctctggactccagattttctcgtccacgccgttcagtacgccggaaagacgcccttcacggtgacgctgttgcaacagaccttccataccgtaggcaaactgcggttcggtgatctcgcgagcgtaggttggactgaccgccgtaatgtgatcggcatagtacagaccggccttcaggaaagagatttgtccgttgaattccagcccatgaatattaaagaatgaccatggcaattggatgtcattcatgtgatgtgcataaaacatgccttgataggccaggttgtgcacagtaaacaccgacttcgccggacgcccgcgcgccgccagatacgcaggcgcaaggcctgcatgccagtcgtgcgcatgcaccacatcaggacgccagaatgggtcaagcccgctggccatttctgccccaacccaccccagcagcgcaaaacgcaatacgttgtcggtataggcaaataagttggtatcgtgatacgggcttcccggacgatcatagagatgcggcgcgtcaatcaggtaaatgccaaccccgttgtaatgaccgaacaacagcgtgatatgtccggcgaaggtatcacgacgggatactacctgcgcatcggtcacgccacggcgaatatcgggaaatgcaggcaacagtacgcgagcgtcaacgccgtctgcgatttgtgctgcgggtaatgccccaataacatcagccagaccgccggttttaagcagcgggaacatctctgaacatacatgtaaaacctgcattatcgctcctgtttatgccctaacttccgtagcatttcgcgcgttaccagcacgatgccttcttctgaacgatagaaacgacgtgcatcttcctctgcgttttcaccaatcaccatgccttccggaataacacaagcacgatcgatgacgcagcggcgcagacggcacgagcgacctacccatacttccggtaacaatacggcggaatcaatgttgcagaatgaattcacgcgaacgcgcgagaacagaacggactgcaccaccaccgaaccggagatcacacaaccgccggaaaccagtgagttaagggtcatcccgtggctaccggagcgatcctgcacgaatttcgctggcggtaatgattcattgtaggtgcgaattggccaattgcgatcgtacatatccagttccggcaccacagaggccagatcgaggttcgctttccagtaagcttccagcgtacccacatcgcgccagtacggctcggcatccgggtcggattgtacgcaagagagcgggaacgggtgcgcataggccagaccggcttcggtgatcttgggaatcaaatctttgccaaagtcgtggctggagttctcatcgcgatcgtcttcttccagcagttcatacagatagtcggcgtcaaagacgtagatacccatactcgccagagatttgctcggatcgttcggcattgacggcgggttagcaggtttttcaacgaattcgataattttatcgttctcatcaaccgccataacgccaaatgcggaggcttcttcaatcggtactggcatacaagcaacggtgcaacgtgcgcctttttcgacgtgatcgataagcatacgcgagtagtcttgcttgtagatatggtcgcccgccaggatcaccacgtattccgctttataacggcggataatgtcgaggttttgggtgaccgcatctgcggtgccgcgataccagttttcccctttcattctctgctgtgctggcagcagatcgacaaactcgttcatttcttcattgaagaatgaccagccgcgctgaatgtgctgcaccagagtgtgggactggtactgggtgatcacgcccatacgacggatcccggagttgatgcagttagacagcgcaaagtcgataatgcggaacttaccgccgaagtgtacggccggttttgctcgcttattggttaaatccttcaggcgggtaccacgtcctcccgccagtatcagggcaacagatttcaatggcagctggcgcgccaacattaagtgatcgttcttctctaaactaaccatgactaactccttttttatcatctctggaacacacacaatccgtgtgcaggtccctgccagacagccgtaatcactgggttatcctctccagcgaatgggggaatggcgtgccactccccagcaggtaaaacaatctctgttacctcaagcgtggcgttaattgcgatcaaaaagcgatccgagagcagaatttgcagctgtttcggcccgttttgccactcatccgtgcttaaaggttgagcatatcgatttagccaacggacattgccgtcgccttcttcccaccagcgattctccaccaaagcgggaatgcgcttgcgcagatggattaacgcggcggtaaatgcggttaaaccactgcttgcctgcgaccagtccaaccaggttaattggttatcctgacagtaggcattgttattgccatgctggctgtgaccatgttcgtcaccggccagtaacatcggcgtaccctgggagagcaacaacgttgttaacagggcgtgaatgctgtcgcgccgccgttcaaccaggtcaagagaaccgcctaacccttctttaccatgattgttactgtaattgttgttggtcccgtcgcgattttcttctccgtttgcttcattgtgtttatggttgaagcaaacgcagtcgcgaagcgtaaaaccgtcatgcgcggtgacgagattaatcgcggcactcggcagacgaccattacgtttaaaaacatcgctggaggcagcaaaacgcccggcaaacgcccccagaggcaaatcataatgtagccagaaacgacgggcagcatcgcggaaatgatcgttccactcggcaaacagcggcgggaaatttcccacctgataaccaccaggagcgatatcccacggttcagcaattaacttcacctgcgagagcaccgggcagttctggatagcggtaaacaacggcgcatcctgacggaactctggcgtacggcccatgactgccgccagatcaaagcggaaaccatcgacgtggcaggtttctacccaataacgcaggcaggcgctggcataatccaccaccgccggatgactcaaattgagcgtgttgccgcaaccggtccagttgtgataatcgccgtcttctcttatccaataatagctacggttatcgatcccacgcagcgagaataacgggccgtcgaggtccagttccgcactatggttgagcacgatatcaagaatgacttcgatacccgctttatgcagtgctttgattgcatcgcgaaactcatccagcgccgtttctggcgagcaggcatacgccggatgcagcgcaaacatcgccaccgggttgtaaccccagtagttacttagccccatgcgttgcagacgtggttcactggcaaactgcgccactggcagcagttccagcgcggtaatgcccaattgtttcaaatagttgatcatcaccggatgcccgagggctttataagtgccacggatctcgaccgggatctccgggtgcaagtacgttaatcctttgacatgggcttcataaatgatggtgctgccccacggcgtgcgcggcggggcatcatcttcccagtcatagtgatcaaccaccactacgcatttcggcgcaatggcggcgttgtcgcgatagtcaggttcattatgaccggcgtgcagcagcgggttatctttaaactccccgtcaatttgccgcgcgcaaggatcaatcaacaacttcgccgggttaaagcgatgcccctcggcgggttgccaggggccatgaacgcgataaccataacgcaaacccgggcgcgcatccggcagataaccgtgccaaatgtcgccactgtgccctggcaagtcatagcgatgttcctggccattggcgtcaaagacacacagttctacccgctcggcatgagcggagaaaagtgtgaagttgacgccctgaccgtcgtaatgcgcgccgaggggagcgggtttgccaatggcgagttgtgtcattctgcctcccgaaccagccagatagtggccagcggtggtagcgtcaggcttagtgaatgctgacgaccgtggctggcaatctcatcgctgtgtaccgtgccgccattgcctgcattactgccgtgatagtgcatggaatcggtattgaggatttcacgccatttgcccggctggtttatgccgaagcgataatcatgacgcggtaccggcgtaaagttactggcaacgatgatttcgttaccctctttatcgcgacgcacaaagatcagcaccgagcgttctttgtcatccaccaccagccattcaaagccgtacgggtcaaaatccagttcatgcattgctttatggtggcggtaggtgaggttcagatcgcgcaccagacgctggacaccgtggtgccagttatcgccgccttccaacagatgccagtcgaggctggcgtcatggttccactcgcggccctgggcaaattcgttacccatgaacagtagtttcttgcccgggaatgcccacatccagccatagtaggcgcgcaggttcgcgaatttctgccatgcgtcgcccggcatgcggtcgagaatcgattttttaccgtggaccacttcatcatgcgacaacggcaggacgaagttttcagtgtagttgtagagaatcccgaaggtcagtttatcgtgatgatactgacgataaaccgggtcgagcttcatgtagtccagggtgtcatgcatccagccgaggttccacttgtaccagaagcccagaccgcccatatcctgcggacgagaaacgccagggaaatcggtagactcctcagccattgtcaccgcaccggaaacctgctcaccaagaatacggttggtattacgcaagaattcaatcgcttcaagattctcgcgcccgccaaattcgttcgggatccactccccctctttacggctgtagtcgcgataaatcattgacgccaccgcatcgacgcgcagcgcatcaataccaaaacgttcaatccagtaaagcgcgttaccgacgaggaagttactgacttcacggcgaccatagttgtagatcagcgtgttccagtcctgatgatagccttcacgcggatcgctgtgttcatacaagttcgtgccatcaaattcggcaagcgcaaagtcatcagtcgggaagtggcctggcacccagtcgagaatcacgttcagaccagctgcgtgtgcggcatcaatgaaataacggaagtcgtcgcgagtaccaaaacggcgggttggcgcatacaggccggttggctgataaccccaactgccatcgaagggatgctcgttaatgggcagtagttcgaggtgggtaaagcccatccatttagcataaggcaccagttgatcggccagctcgcggtagctcaaccagaaattgttgtcggtgtggcgacgccaggaacccaggtgaacttcataaatagagattggcgcatcaaactgattcgcttttttgcgctcttcagtctgtacaaccttttccggcagcccgcaaataagagacgcggtttccgggcgcatttgcgcttcaaaggcataagggtcggacttcagacgcaagttgccattggcatcaatcatctcgtatttatagagctgaccgttatgcgccccagggataaacagttcccagatgccgctctctttacgcaggcgcatcgggtgacggcgaccgtcccagtagttgaattgcccaaccaccgagacccgacgggcgtttggagcccagacagagaaacgcgtacctgtgacgccatccatagtatctgcatgcgcgcctaaggtttcatacgggcgcaggtgagtaccttcagataatagccaggcatccatttcctggattagcggaccaaaacggtaaggatcatcaatcaggttttgctgaccatgccagacaacagccaactgatagcggaaaaaattcttacgtcgcggaatgacgccgctaaagaatccccgtgagtcgagacactccagttttgcgagtttgcgcccggttttcggttcaatcacccacacatcggtagcgtcgggtaaaagggcacggacttccagtcccgcggtggttttatgcattcccagtacggaaaaaggatccgcaaaatggcctgcaattagcgcgttaatcacgtctctatcgatacgatcggacatgcttgtcttcctgttttattgtgtcaccccatccaattggatttttgacttctggttgtgacatttttttgacctgaacggcgcagcactctgtgcatcctctctgcgtcgtcctcacttcaggtaaggctgtgaatactcatgtattcagccacccttaaagaatagccaatgctctatttaactcccggtaaatcatgaaacatctgcgcttactcctgtattacgcactaacaggggcggcatcgcgccccagatttaatgaataaagattacgccagttgacgaagcatccgacgcagcggctccgcggccccccacagcagctggtcgcccacggtaaaggctgacaggaactctggtcccatattcagcttacgcaggcggcctaccggcgtggtcagcgtgccggtaacggcagctggggttagctcacgcatagtgatttcccgatcgttcggaacgactttcgcccacggattgtgcgcagccagcagttcttccacggtcggaatagacacatcttttttcaatttaatagtgaatgcctggctgtggcagcgcaatgccccgacacgcacacataaaccatctaccggaattacggaagatgtgttgaggatcttgttggtttccgcctgccctttccactcttcgcggctctgaccgttatcgagctgtttgtcgatccacggaatcaggctacccgccagcggcacgccaaagttatccaccggcagctcaccgctacgggttaaggttgtgactttgcgttcgatatcgagaatagcagaggacggggtcgcgagttcatctgccacatggccatacagatggcccatctgggttaataactcacgcatatgtcgcgcaccaccgccggaagcggcctggtaggttgcaacggacacccaatcaacaagatcattggcgaataaaccacccaacgacatcaacatcaggcttacggtacagttaccgccaacaaaagtcctgatgccattatttaatccgtcggtaatgacgtcctgattgacggggtcaagaatgatgatggcgtcatctttcatgcgcagagacgatgctgcgtcaatccagtaaccttgccatccgctttcacgaagctttggatagatttcgttggtataatcgccgccctgacaggtcacaatgatatcgagggcctttagcgcctccagatcaaaggcatcctgaagtgtgccagtggttccgccaaaagacggcgcagcctggccaagctgagaagtagaaaagaagacagggcgaatggcgtcgaagtcgcgctcttcaaccatgcgttgcatgagaacggagccgaccataccgcgccagccgataaaaccaacatttttcataagcgtttttttcctgcaaagatgtgtgctgtataaatgtgccggtctcctcttggcacatctttcaccatacaaaaagcagccaaagtcgcaagtgaaattaatcaatgatagcgaagccatcagtaatgcgacttatcctgctttgttagcacgcagaaagtccgcggcaattatcagggaatttgagttatgaatgaaatcatttctgcagcagttttattgatcctgattatggatccgctcggaaacctacctattttcatgtccgtactgaaacatactgaaccgaaaagacggcgggcaatcatggtgcgagagttgcttattgctctcctggtgatgctggtgttcctgtttgcgggtgagaaaattctggcatttcttagcctacgagcagaaaccgtctccatttctggcggcatcattctgtttctgatcgccattaaaatgattttccccagcgcttcaggaaatagcagcgggcttccggcaggtgaagagccatttatcgtgccgttggcaattccgttagtcgccgggccgactattctcgccacgctgatgttgttgtctcatcagtacccgaatcagatggggcatctggtgattgctctgctgctggcctggggcggcacctttgtcatcctgctacagtcttcgctatttttacgtctgctgggcgagaaaggggtgaacgcacttgaacgcctgatgggattgattctggtgatgatggcaacccagatgttcctcgacggcattcgaatgtggatgaaggggtaacgaggagagtttttcgaaaagaacccggtagcgtcacaactaccgggcgaacaaacttaactcaacagctggaacgcaatcatcccaacgatggcaccgacagtgccgaggatggtttccatcatggtccaggttttcagcgtttcggcttcggtcgcgccggtaaatttaccgaacaaccagaaaccggcgtcgttaacgtggctgacaacaatcgaaccaccagcgatacaaatcgacagcgccgccatttgcgcaccggagtagttcagttgttcaataaccggcatcaccagtcctaccgccgttaaacaggctacggtggcagaaccctgaatgatgcgcactgcagctgccagcacgaagcaggtgatagcaatcggcaggcccatgccggttaacgttcgcccagtgccggacctacgccagagtcaaccagcacctgtttgaacacgccgcccgcaccaatcaccagcagaatgatccccgccggttgcagcgcgtgaccgcaaatctccatcactttgtcttttggcatgccctgacgcattgccagaccgtaaatcgccaccagacaagcaaccagaatcgcggtaaacggatgaccgataaactcaaaccattcgtaagcagttgatccttccggcacaaaacgcgcggcaatggttttcagccctaccagcaccagcggcagcaggatcagcgacaggctgaatccgaaagatggcattttgccttcgccgagatgcggttcgctgatgtcgtcaggaatatgcagctcaacgtaacggctgatgaagttaccccacagcggcccggcaataatcattcccggaattgccgcacacaggccaatcaggatcatccagccaaagtcggcattcatctgcgatgccagcagcatcggcgctggtccaggcaccagaaatgccgccgctgccgccacgcctgcaaataatgggattaccagcttcaccaggttcgtaccggtgtggcgcgccattgagaaagcaacgctaatcagcagaactatcgccacttcaaagaacagcggtagcgcacagaccagccccgcaaggccgatggcataatgcgcgcggctgtgaccgaaggatttgagcattttgacggcaatctgatcgactgcgccggtttcatgtaagatcttgccaaacatagctcccagggcgacaaccaccgccaggaagccgagggtgcctcccatccctttttccatcgtcgctgcgattttatcgagcggcataccagaaaaaaggccagcccccatggacaccaccattaaagccaggaaagcgtgcatacgcgccttcatgactaaaaacagcagcagtaaaacagaccctactgctgttaaaacaagcgttaatgtagtcactacttatttgccttttttaataacctcaatggtgcttgccacaacaccttccagcggttgatcgatatccaccaccagtacatcggtttcgtccgcacccggctcctgcagcgtttcaaactgcgtcaccaacatttgggttttaaagaaatggcctttgcgcgctttcaggcggctttcaatcacatcaaaatcgcctttcaaatagatgaaagagagattcggattaccttcacgcagcaagtcgcgatagtgttttttcaatgcagaacagacgatcagcgacactttattagtgcgctgcatagcaaacgcggcgtcgttcagcgcctgcaaccacggtttgcgatcgtcgtcattcagtggttcgccagacgccattttttcgatattgcgccgtggatggaggaaatcgccatcaagaaacgcggcatgaagttgatgcgccacttcactggcgaccgcagatttgccgctgcccgatacgcccatcaagacgtaaatgtggtgatcatggttagtcgtgctcaaagtggtgcccccacaatacaagaattaaaaatgttacgggtaactgttatcggtaacattgtccagccggacaatatcagaagcaatatccatccatgccttaagtgtataagtgtgagctacttcaaatttgtgggcttaaatagatccgcccggtgacaaggtgaaacctaaatctaacattttcggtgtcacagattcgccacgaatacgcgccagcagcgttcagcgccaatactgcccatccgctcacgcggcgtcagcacgctcgcaagtcgtggctccatcacctgaccaatgtcatgaccgtggaaaccggcaatcgccatatcgtcaggaacttttaaccccagacgctgacattcaaacgccgcgccgaccgccaggtcatcattcgtacagaacacgccatccagctgcggatattcccgccgcgcctggcgaatcagttcaataccggaagagtaagaagaagattgctcaaccatcacgctatatggcaccaggcctgcatccagcatcgcctgttcgtatcccttctgtttgatgatagtacgttcgtcgagacgtgcgccgagataggcaatgtggcgatgcccgcgagcaataatggcagtggtcatctggcgtgctgcttcaaagttatcaaaaccgacggcgatatcaaggcatggcgacttgctgtccatcagttccaccacgggaatacccgccacttcaatcatctttaaggtgcgcggcgtgtgggtacgttcggtgaggatcaggccgtcgatattccaggagagcatggattcgaggcgttcttgctccatttccggtttataaccgtagtgcgccagcatggtctgataaccgtgcgcgtcggtgacgctttcgattccgcgtaatacttccgcgaaaacctggttggtgagagaaggtaacaggacgccaatcgcccggctggtggcgttagagaggatatcgggcgcacgattgggaatatagcccagttcatcaagagccgcggcaatcttgccgcgtagagcgacggaaacctgctccgggttgcgtaaaaaacggctgaccgtcattttggtcacgcctacacggtcagccacatcctgaagtacgggtcttttctttttcatcgtcctgaaggtacaaaagagatagattctcttagtttaacacggacacatcagaaccttcccggggaaaacagtgcttgtttacaattattagatatacactaaatcaattgcatcgcattgtgctaacgacgcggcaaaaccccggaagcgtacatcagcacgcgaccggagcgagcgaggaagcctgcaaaaaggcaggcttcaaagatgccgttgagttttaaaccggcggcagatcgaacagtaacacttcgctgtcgctatccgcatggatggagattgcctgctcatcccagattgccagaccatcgctggtcgaggctttcacgccgttaatggtgacattgcctttcaccacctggatccagacgcggcgttcagcggcaatctgatgcaccgactgctcatctttcagcaacgcccagcggtacagttccatatcctgatgcactttcaatgaaccatctcgcgcatccggcgagagcaccagctgtttgccctgtacggcatcgaagcgacgctgttcataacgcggcgtaataccgttttcttcaggcatgatccagatctgatacagatgcagacgctcggtgctgcttgggttgtactctgagtgacgaatacccgtaccagcactcataatctggaactcacccgccggaacctgctctttattgcccatgctgtcctgatgctcaacagtaccttccagcacgtaggtcaaaatttccatatctttatgcgggtgagtgccgaagccctgccctgcttcaatcacgtcgtcgttaatcacgcgcagcgcggagaagcccataaagttcggatcgtaatagttggcaaaagagaaagtatgccaggagtccagccagccatgatttgcatgaccacgttcatttgctttgcgtaagtagatcatttgtattcgccccctgaatgatttcgatgggcttagtgtggacccgatctgcctgggatgatagagggtgaaaattgacccctctgttcaaaaaaattgaactattcgaggggccatcaaacttacttagcgagagttactgtggagggagaggcttgctcaaatccgcgttcaaggatttccagattggtaagaacttcagattccttgacgtaatttggcgcaccgtgggtgatggtttgatacaacgcatcataaacgcgcccgtaatcgcccatctccggcttcatctcttctctgaccgtcacgccctcgtcattgacatactccagcacaccgaccgaatcatccgctgcgaatcccggttcgcccggcataatattagccttcaggctggtttcctgctggtcgataccgtatttaataaacgaacctttcttaccgtgaacgataaatttcggataatcgattttcaccagatggctggttttgacgatggctttcaggtcgccataaaacagttgcgcttcaaaggtgtcgtcaggattggctttattacgcaggctgcggatgtcataagcgacgtgatccgggcgaccgaacagagaaataatctggtccatcgtatgcacaccaaggccataaaacgcgccatcctgcggcagcccaggtttggtttctgccaccgggcggtaatagtcaaaatggctttccacttcaacaatctctcccaacttgccactttcaatcgcttttttcgctgtcaggaagcaggagtcaaagcgacgattctgatacggcgtgacggtcagccctttgcttttcgccaacgcaaacagctctttcgcctgcgcaagtgtcggagtgaacggtttttcgaccagcacatttttcccggcttccagcgcgcgtttcgcgtactcgaaatggctgtccgcgtgggtgcagacaacaaccagcttaacatcgggatcgtttagtacttcgtcgagatcgctggtgaaatggatatgggaataaatgggagcctgttcttccggcttcgcatggcgacgaaaaatatgcgcgacatgccagctatccttgcggttaagtacatacggcagatggtaacgggtggtgcttttgccgaagccaataaaggcgcagttgatgaccatgatttcgtcctttttaaggtggttatttacaccttagcgcaaagcggacgtggttcctactggagtgcgcataacgaacacaagcactcccgtggataaattgagaacgaaagatcaaaaaaaaagccagcacccggctggctaagtaatactggaagcaatgtgagcaatgtcgtgctttcaggttctccgcgagggtcttcctgatcgcgagacaataataatcattctcattcgcacttgtccaacactttttgcaaaaaaatgcatttgactcgcatttgaaagtcaatgatgttgaaagggacatttaccccaaagaggacaaaggaatgagtgagatagtaatacgccacgcagaaacacgggattacgaggccatcaggcagattcacgcccagccggaggtgtattgcaacacactacaggtgcctcatccttccgatcatatgtggcaggagcgactcgccgatcgtcccggcatcaagcaactcgtcgcctgtattgatggagacgtcgtgggccatctcaccattgacgtgcaacagcgcccacgccgcagtcatgttgccgattttggtatctgtgtcgactctcgttggaagaaccgcggcgtcgccagcgccctgatgcgagagatgattgaaatgtgcgacaactggttgcgggtagatcgcattgaactaaccgtgtttgtcgataacgccccggcaattaaggtctataaaaaatacggctttgaaattgaagggactggtaagaagtacgcattgcgtaatggtgaatatgtcgatgcatattatatggcgcgggtgaagtaagatagtgccctttttctgagatggaaaaagggtgtcattcaaaatcgacataccttcctttaaggtatttatttgcccaatacatatattgagatttaactcataattacttcctaaagtgtaatattttattttttaatatatacgcctacaatttcctggagtaaataaataacaattaacaagcataatattgccattgataaaatagcatgccataaaaggacttttcagggatgagtaatattgtttacctgacagtaacgggagaacaacaaggaagcatctccgcaggttgtgggacttctgagtctacaggtaatcgttggcagagcgggcatgaggatgaaatatttacattctcactcttaaataatattaataatacggggcttggttcacagttccatggtataacattttgtaaattaattgataaaagcactccattatttattaattccattaacaataatgaacaattatttatgggatttgacttctatcgaataaatagatttggtagattggaaaagtattattatatacaactaagaggcgcttttttatcggctattcatcaccagatcattgaaaaccaactggatacagaaacaataactattagttatgaatttatcctctgtcaacatcttatcgcaaataccgagttcagctatttggcactccctgaaaattataaccgtttgtttttaccaaattcaaaaaaccaaacaaataatcgtttcaaaacgttaaacagcaaagctattggcaggctacttgctgctggtggcgtatacaatgggaacattgaaggattcagagatactgcggaaaaactgggtggagatgcaataaaaggctatgatcaaatactaaatgaaaaaacagcgggcatagcgatagcaacagcatctattcttttaacaaagcgttctaatgttgatacatatacagaaataaatagttacttaggcaaacttagaggtcaacaaaaacttcttgatggtatagacataatagaaataatatacattaagagaccttcaaaagacttagctaacttacgaaaggagtttaataaaactgtaagaaaaaattttcttatcaaacttgcaaaaacctccgaagcatctggaagattcaacgccgaagaccttttaagaatgagaaagggcaatgttcctctaaattataatgttcaccataaactatctctagatgatggtggtactaatgatttcgaaaatttagtattaatcgaaaacgaaccatatcataaagtttttactaacatgcaatcacgaatagctaagggaatattagtaggtgaaagcaaaatcactccctgggccattccatctggctcaatttatcctcccatgaaaaatattatggaccacacaaaatgatgactaaaacccaaataaataaattaataaaaatgatgaatgatttagactatccatttgaagcaccgctcaaggaatcatttattgaaagtataatccaaatagaatttaattctaattcaactaattgcctggagaagttatgtaatgaagttagtattctttttaagaatcaacctgattatcttacttttttaagagcaatggatggattcgaagttaatggattacgattatttagcctctcgattccagaaccttcagttaaaaacctttttgccgtaaatgaattttatagaaataatgatgatttcataaaccctgatctacaagaacggttagtgatcggggattatagcatttcaatatttacttatgacattaaaggtgatgctgccaacttactgatttagtgtatgatggtgtttttgaggtgctccagtggcttctgtttctatcagctgtccctcctgttcagctactgacggggtggtgcgtaacggcaaaagcaccgccggacatcagcgctatctctgctctcactgccgtaaaacatggcaactgcagttcacttacaccgcttctcaacccggtacgcaccagaaaatcattgatatggccatgaatggcgttggatgccgggcaacagcccgcattatgggcgttggcctcaacacgattttacgtcacttaaaaaactcaggccgcagtcggtaacctcgcgcatacagccgggcagtgacgtcatcgtctgcgcggaaatggacgaacagtggggctatgtcggggctaaatcgcgccagcgctggctgttttacgcgtatgacagtctccggaagacggttgttgcgcacgtattcggtgaacgcactatggcgacgctggggcgtcttatgagcctgctgtcaccctttgacgtggtgatatggatgacggatggctggccgctgtatgaatcccgcctgaagggaaagctgcacgtaatcagcaagcgatatacgcagcgaattgagcggcataacctgaatctgaggcagcacctggcacggctgggacggaagtcgctgtcgttctcaaaatcggtggagctgcatgacaaagtcatcgggcattatctgaacataaaacactatcaataagttggagtcattaccgacattaaaagtaacttttttgaaattagagataatattggcacagaaaatatattcagttcgtttagtgatttctcttcattcttaaacgaaatcatggacagttgttcataataatcaaaaggaaacaaaaatcattgtaaaccatgccatctttttagagattaccagcagaaaattccttgttcgaaatttagcagtgcaagctatggaaaaacttacaacggaactacactccttaagtgagatggaccgaagacatgtagtctctattttagccgaaatagctaatggctatgatgattttaatgacatgttgatttatttagaattttacccgaatcataagattctgatatcttaaataagaaaatcccgttcgacgttctgaaaaagaaatcataaaatattagcagatacttatttcgtgactatatcttatccgatgaacttttttcaaaaccagcatttaataatatctttgacgaagatgaacgcgtctttgctcaatgtatcacacaggaataataatataacactcaacaataatatttattataattatgattacttatcacgacgcattcgcgaaagcgaaccattaccttgatgatgcagatctcccggtcgtcattactctacatggacgctttagccagggctggtatttctgtttcgaagcacgagaatttctcgaaactggagatgaggccgcgcgcttagctggtaacgcaccttttattattgataaagacagtggtgaaattcattctctgggaacggcaaaaccgctggaagaatatctacaggattacgaaataaaaaaggctaccttcggcttgccctgacaaaatagccctcttcccacgaagagggccgctaaccttagtaccccgccgttaaatcatccaccgagcgcgggtcggatgcgccgtacaactcaccgtccggcccaaccataatgctttgtgtactgcccatcgcctctttcagcgccactttctgaccttttgcttccagcagcttgagcgtatccgggctaaaccctttttcgacacgcagctcgtccggcaaccactgatggtggaaacgcggcgcattggtcgcttcggcgacgttcaagccataatcgatgctattcaccaccatttgcagcactgtagtgatgatccggctaccgcctgggctaccggtaaccagccaggttttaccgtctttcaccacaatggtcggcgacatcgacgacagcgggcgtttgttcggcccgacggcgttggcatcaccgcccaccagcccgtaaacgttcggtacgcccggtttggcggagaaatcatccatctggttattaagcagaataccgctctcgcccgcgacaatgcccgtaccgaaggtggtgttcagcgtataggtcaccgccaccgcgttaccatctttatccaccactgagtaatgggtagtttgattactctcataaggcgcaagcttgccggggcgaatttcgctggatggcttcgctttattgatatcaatttgatcggcaatagatttggcataggctttattggtcagcgcctgccacggtactttgacaaaatccgggtcgccaagatattccgagcggtcggcgtaggcgtatttctccgcttctgccatgatttgcatcgcatcggcgctgccaaagccgtatttcttcatatcgaagttttccagaatattgaggatttgtacgatatggatcccgccggaggatggcggtggcatggagtaaacctgatacccgcgataatcgccgcttatcggagtgcgttcgaccgctttataggctgctaaatcttctttagtgatcaagccaccgtttttctgcatctcctgggcgatctgttccgcaatcgtgcctttatagaattcgtccgggccgttttcagcaatcatctccaggctctttgccaggttcgcctgcaccagcgtgtcgccctttttcagcggctcgccctctttccagaagatagctttactgttttcgtgattcggcaacacttcgctaccgtaggttttgagatcgtcagccagcgcgtcgttaacgataaaaccatcgcgtgccagtttaaacgcgggctgcacgactttgttcagcggcatggtgccgtatttatccagcgccagcgagaaacctgctaccgtacccggtgtgccggaagccagatgcgaagtgagtgattttttgctgtccgggttgccctgatcatcgaggaacatatcgcgggtcgctttggcgggtgccatttcgcggaaatcgatagccgtggtattgccatttttcgagcggattaacataaaaccaccaccgcccagattccctgcctgcggatgcgttaccgccagcgcgtagcccaccgccacggcggcatcaacggcattcccgccctccttgagaatatccacccccacctgagtggcagtggcgtccacagacgctaccattccctgtttcgcgcgtaccgggtggaagacatcttcctccacaccatacgagacgggcggcgcaggaggcgcggcggcggcgctaaaacaacttcctgagagcagagcagcaatggccacccggcgtaaaaacgtcggttttatcatcgttattctccagagattaaggggcaaccccagctaagcctggtatataactctgaattaatcatcgttttgtcgggaagcgagtaaacttaaaggatatcttcagaggaggatacgcgatgaaacgacttctgattcttacggcactcctgccgtttgtcggctttgcacagcccattaatactctgaacaaccctaaccagccggggtatcagatacccagccagcagcggatgcaaacccagatgcagactcagcaaatccagcaaaaagggatgctgaatcagcaactgaaaacgcaaactcagttgcaacagcagcatttagaaaaccagataaacaataattctcagcgggtgttgcagtcacagccgggggagcgaaatcccgcccggcagcaaatgctgcccaacaccaacggcgggatgttaaacagcaaccgtaatccggatagttcgttgaatcagcagcatatgctgccggagaggagaaacggcgacatgctgaatcagcccagcacgccgcagcctgacattccgttgaaaactattgggccgtaaagttcggaccaatcacgtcaatcgcatcggtacagatgcaatccacaccccagcgcagcaactctgctgcgcgctggggtttattgacggtataaaccagaatccgcagtccggcgtctttcaactgcatcactcgcgctttattgagtaacttatgattgagatgaatagagacgcagcccagccgcgcggtcagttcgcgccagtcgtcgcgccactcatccagcaacaaaccgcgcggcagttccggtgccgcctgttgtgcagcttctaaagcatcaatctcaaacgatgacagcagcggcggcgtcataccggcccacagctcgcgtgccgccagcgccaccattttgcccgttaatggcccggtgccggtggtgggtttgatttcgatattcgccatcatcccgtgttcgcggcaacgttccgccacctgcgaaagcaacggtagcggctcacctttaaacattttgctgtaccaactgcccgcatccacgcgcagtaaatcctgccagttcagttcacccgcgacgccccagccgttgctggtacgttcgagattgtcgtcatggagcaggaagatctcgccatctttcgataacttcgcgtcaaattcgatcatcttatgaccgtattttgccccgacgtcgattgacgccagggtgttttccggggccagcttaccgccgccacgatgagcgacgatgcggggataaggccagttactcatactcgttgtcctgtttcaccatcaaaaagatgcagctgattttccgccagatgcagccacagcgtgctgcctgccgtcgggcgctcctgatgcgccagtcgcaccaccagcttctgctcgccccagcgtccgtgcgccaggttatctgcgccgaggatctccagcgtgtccatcaccatcggtacgccgccttctgcctgcgagcttagcgcaatatgttccgggcgaatgccgagagtcattttacgcccggcatactgacggtagccaccgtttagcggcagctcaataccgccgtccagttcgaaatgcgtgccttcgttattcacgcggcctgtcagcaggttcatcgccggactgccgataaaactcgctacaaacaggctggcgggcttttcgtagacttcaactggtgtgccaatctgttcggcaacaccgccgttcatcaccattactcgctgggcgagcgtcatcgcttcaacctgatcgtgagtaacgtagagtgaagtcgttttcaggcgacggtgcaactgttgcagttcaagacgcatctgcacgcgcagcttggcatcgaggttagagagcggctcatcaaacaggaacaccgccggatcgcgcacaatcgcgcggcccatcgccacacgctggcgctgaccgccggaaagctcgcgcgggcgacgtttgagcagaccgtccagctccagaatgcgcgccgcttctttaacgcgctcggcaatttgctgcttgcccatgccgcgaattttcagcccccacgccatgttttcttcgacactcatatgcggataaagcgcgtagttctggaacaccatcgcaatcccgcgatcttttggctccatttcagtcacgcgctggtcgttgatccagatatcgccttctgtcacccgctccagcccggcaaccatgcgcagcagcgtcgatttcccgcagccagacggcccgaccatcacgataaattcgccatccgccacatcaagggtcagcggtttaatgacctgggttttaccatcccagcttttggttactgcctgtaatttcagtcctgccatcttatttctcactatcgaccaggccgcgcacgaaggcacgctgcatcactaaaacaatcaccaccggagggataagcgttaacaacatcgccaccatcactgagttccattccgtggtgccttcgcctgtagcgatcatccctttgatccctgccacggtggtgccgagatccacatcggtaataatcaacaacggccacaaatactgattccagccgtagataaaggtgatcacaaacagcgccgccagattagttttggagagcggaaaaacgatgtcgcaaaagaagcgcattggcgatgcgccgtcgatccgcgcggcttccaccagctcatccggcagcgtcataaagaactggcggaacaggaaagtagcggtcgccgaggccatcagcggcagcgttaaaccggcgtagctgtcgagcatctgcaggttggcgatgacttccaccgtcgggaagatacgtacttcaaccggcagcatcagggtgataaaaatcatccagaagaagaggttacgtagcggaaaacgaaaccagacaatggcaaatgccgagagcatcgagacggtaattttgccgagcgtaatgctgaacgccatcacaaagctgttaagcaacatccgccagaacggcgcgctattcgtgcctaccccgttcacccagatgttgtggatgttttccagcagatgtgtgccggggatgagcgtcatcggcgcggcatagacggcctgtttatccagcgtcgccgcgacaaacgccacgtacagcgggaagaggatcaccgcgatcccgaggatcagcatggtatggctgaatatcgtcagccacggacggttctcaatcattggtaacgcaccttgctttcaacatagcggaactgcaccaccgtcagcacgatgacgaggaacatcaacaccaccgactgtgcggcagacgaagccagatccagtccggtaaaaccttcgcggtagatcttataaatcagcgtcgtggtggcctgaaccggcccgccggacgtggcggcgtcgatcaccgggaaggtgtcgaagaaggcatacaccaggttcactaccagcaggaagaaactcaccggggcgataagcggcagcgcaatcttaaagaagcggcgaatcggccctgcaccgtcgatggctgcggcttcgatcaacgaacggggaatggattgcagcgcggcatagaagaacaggaagttgtagctgatttgcttccatactgaggcaaacaccaccagaaacattgcctgaccgctgttttgcgcgtggttccagtcgtagccgaactccgcgagaaaatgggtgatcagcccgcgaccggggttaaacaggaagatccacaatacggcggcaacggcgggagccacggcgtaaggcagcaacattaaggtttgatagaaacggctgccgcgcacgatgtactccaccagcgccgcaaagaacagcgataccagcaaaccgctgacggtgacaaaggtgctgaattttatcgtcgtccagaaggagtcgagatagtagctgtcatggaacagcgtgacgaagttatccaggccgacaaactggctggagaaaccaaacggatcgacgctttgtagcgagtaccacaacgcttcgcccgcaggccagataaaaaagataacggtgatgatgagctgcggcgcgaccagcagataaggcagccagcgcgagcggaacaccggacgggatgatgacattacggttaattcctgaactgtgccggatgcgcttcgcttatccggcctacacgcgatgccaggtcagataagcgaaacgcatccgacattacactgattaagacttcgtcgatttctcaaagcggcgcagcaactgatttccacgctcaacggcggtatccagtgcctgctgtggtgtcttcttaccggtccacacgctctccagctcttcatccacaatcacgcggatctgcggcatgttgcccagacgcagccctttggtgaacggcaacggcggcttattcagcatctgacgcgtcgcggtatccgcccctgggtttttctcataaaagccctgctcacgggtcaggtcatacgctgctttggtgattggcagataaccggttttctgatgccactcggcagcgttttctggcttcgcgaggaaatcgaggaacttcgccacaccggtatacgtttctttatctttaccctgcatcacccacaggctggctccgccgataatggcgttttgtggcgcatctttcgcatcggcgtcgtaaggcatcatgcctacgccgtagttaaatttggcgtactcgcgaatgttggcaagagaaccggaagaggcggtggtcatcgcgcaatcaccgttatagaacttctcggtggattcatccttacgaccgacgtagctgaagtcgcccttcttgttcatctcctcgagcatggcgatgtgtttcacctgctccggcttattgaactccagcaccgcgtccgtgccgtcaaagccgttgtttttgctggcaaacggcagaccgttccaggcgctaaagttttccagttggatccagccctgccagccgctggcgtagccgcacttcatgccggaggctttcagtttcgcggcatagtccgccagatcctgccaggttttcggcggctgttccgggtctaatcctgctttcttgaaggcgtctttgttgtaatagagaacgggggtcgagctgttgaatggctgggagagtaagtggcccgttttgctgtcggagtagtaacctgaaaccgtcggcacaaactgcgactcatcgaactgaatccctgcctctttaaacacgtcatacaccggtttaatggctttcgacgccatcatggtggcggtgccaacttcataaacctgcaaaatagccggcgcgttgccggtacgaaatgcggcaatccccgcgcttaaattctgttcgtagttgcctttataggtcggtacaattttgtaatccgggttttcggcgttaaaacgttgggccagagaatccacctctttacccagttccccttccatagaatgccagaacggaatggtcgtcactgcctgtgcattccccattaacgccagtccgagcgccagtgctgaagctgtataatgtaacggtttcatcgtttatctctcttgttgtaccgaatgcgcgaattcacgcgttttatgctcgcggggtaacatgacatgctcgaattacagaaaaataacttttttgttacatttgtaagatagtaaggtgtcagaaagatgacaaggcggtgacggcgtgggtgagggaaaatgggagatggggcacggataagcgggaaaatatagaaggtctgaatcaaactctacagattgctcatcgtttcatgccggatgcggcgtaaacgccttatcaggcctacaagatcgtgcaaattcaacatattgccactcacccagtaggcctgataagcgcagcgcatcaggcaattttacatttgtcacctgtctcaaaggagtcttttgactccctatcaatcaacgtgttattacccgcctaaatacgcacttctcaccgcttcattcgccagcagcgcatcaccagtatcggaaagcactacatggccgttttccagcacgtagccgcgatccgccagctttagcgcctggttggcgttctgctcgacgagaaagatagtcatcccctgctcgcgcagctgctcgatggtgtcgaaaatttgctggatgataatcggcgcaagaccgagcgatggctcatcaagcagtagcaaacgcgggttgctcatcagcgcacgaccaatcgccagcatctgctgttcaccgccggacatggtgcccgcccgctgaatacggcgctcatgcagacgtggaaacagctcatacacccactttatgcgctcctggaactggtcgcgttcagcaaaaaaaccgcccatcgccaggttctcttccaccgtcatccgcgagaagacgcgacgcccttccgggacaatcgccaccgcttcgcgcatgattttcgctgtctgccagtcggtaatgtctttatcatcaaacacaattcgcccgctggtggcacgcggatcgccgcataacgtgccgagcaaggtggttttccccgccccgttcgcgccaatcagcgtgacaatctcgccctgattgatatgcaggctcacctcatgcagcgcctggattttgccgtagtgggcgctgactttgtcaaaggacaacatgactttttccatcttatgcctcacctaaataggcacggatcacgtccgggttattacggatctgctccggcgtaccgtttgccagcggcgtcccctgattgaccacgtaaattcggtccgaaattcccatcaccagcttcatatcgtgttcaatcaacaagatagtggtgttgtgatgattgcgcagttcggcaatcagctcatccagctctttcgtctctttcgggttaagacctgccgcaggttcgtcgagcattaaaatctccggctgcgtcaccatgcagcgggcaatctcaagacggcgctggtcaccataggccaggttactcgcctgacggttggcgtgttccagcaaaccaatgcgctcaagccaggtcgcggcgcggtcgagcgcttcgctctgggcgcgacggaaggatggcgttttcaacaggccagagaacagcccggttttcagttgctgatgctgcgccaccagcaggttttcaattaccgtcatttcacggaacagacgcacatgctggaaggtgcgcaccacgcccatgcgggcaatttgctgccccggtaaaccttccaggtgctgatcgcgcagtaaaatggtgccgccggtgggtttgtagaatccggtcagacagttaaaaaccgtggtttttccggcaccgttagggccgattaacgagacgatctcctgcgggtacagttcaagattgacgttgttcaccgccagcaggccgccgaagcgcatcatcaggccgttaacagataataatggctgactcatgcctgctctcctttcgctgcgccgtttttcagcttcagttgcgggcgcgtcatgggcagcaagccctgcggacgccagatcatcatcagcaccatcaaaccaccgagcattaacatgctgtattcgttgaaatcacgcatcaactcgcgcgacaccaccagcaaaattgccgccagaatcaccgcaaattgcgagcccataccgccgagcaccactatcgccagcacaaacgccgattcggcaaaggtgaaggattccgggctgacaaagccctgacgcgccgcaaacagcgttccggcaaaaccggcaaacgcggcacttatggtaaaggcagtcagcttgatacgacgcgggcttaagcccagcgaacggcaggcgatttcatcttcacgcaacgcttcccacgcacgccccagcggcatccgcagcaggcggttaatgacaaacaggcttagcaccaccagcagcaacgccaccaggtagaggaagatgacacgatcggagggatcgtatttcaggccaaagaaattactgaacgtgtcccagccgccttcacgagcggtacggctgaactcgagtccgaagagtgtcggtttcgggatctgactgattccgttcgggccgccggtaatttcggtgttattgagcagcaatatgcgcacaatttcgccgaaaccgagggtaacgatcgccagatagtcaccgcgcaaacgcagcaccggaaaaccgagcaggaagcccgccgccgctgccattaatccagcaatcggcaggcaggtccagaagcccaagccgtaatagtgattgagcagcgcaaaagtgtaagcgccgatggcgtaaaaaccgccgtaccccagcaccagcagaccagaaagaccaacaaccacgttcagcccgagaccgaggataatgtagatcatggtcagggtggcaatatccaccgtcccgcgtgaaaccataaacggccacgccaccgcaagcaccaacagcgccacgaggaacagtttctgcttcaccgtggagccatcaatggcgggcagaataaacttcggtccggaaacgcttttcaaccctttctggaaagccggtcgcaaaagctggaagaaaaagaccaccgccgtgccgataaacacccactgccaacggacatccgaagccgtgtcgaccaccagtttggtgccatccagctccagttgcacgcccataaagacgcccgccagcacaaagaacatcgcggcagagagcagcgccattgcaatatgcatcggtttcatactttctctacctccgggcgacccagaataccggtcggcatcaccagcagcaccagaatcagcagggcgaatgagaccacatctttatattccgtactcagataggcagaagagagcgcctccgcaatccccagaatcaggccgccaatcatcgctcccggaatgctgccaatcccaccgagcaccgccgcggtaaaggctttcatcccggccataaagccgatgtaggggttaatgacgccgtagaactgaccgagcagcacacccgccaccgccgccatcgccgcgccaatcacaaaggtcagcgcaatcacccggtcggtgttaatgccaagcagactcgccattttcagatcttccgcgcaggcacgacacgcgcgacccatgcgggaatagcgaatgaaaatcgtcagcgccagcatggcgaggaaggtaacaatccagatcaccgcctgcatggtggtaatagaggcagagaagttttcgctatgccccaccacccactgaccgttaaacaggctcggcagcgccacgtcgcgcgaaccttcggtcaggctgacgtagttttgcaggaagatggacataccgattgcagagatgagtgcaatcaggcgcttagagttacgcaccgggcggtaagccacccgttcgatactccagccgtaggcgctggcaatgacgattgcgccgacgaatcccgcagctaccagcagccagccggtatcaatgcccatcatcatcagcgcggcgatgatcataaatgagacgtagctgccaatcatataaacctcgccgtgggcgaagttgatcatgccgataatgccgtaaaccatggtgtagccgatggctatcagcgcgtaggtactgcccagcgtgacgccgttaaacatctgctgcaagaaatacaaaaactgctcagacataaggtaacctttctaaacccgcccgcattttacgggcggtgggatgatcacttggctgccgtggatgaaccgtcggcgtgccactggaagacaccaaaatcaaatcccttaagatcgcctttttcatcccagttcagcggcccaatcacggtgtttgcaccgttagcttttaaatctttcaccagcgccagcggctcatcgctgccggtacgctcaagggcagtcgccagagattgcaccgccgcgtaggtgatccagacataaggcccggacggatctttcttgtctgctttcagcgcatcaacgatgccctggtttgccggatcctggtcatagcgttttggcatagtgaccaacatgccttcggcggcatcaccggcaatgttcgacaacgacgcattacccacaccttccggccccataaactgggttttcaggccaacggaacgggcctggcgcagcatctgccccatttccgggtagtaaccgccgtagtaaacgaagtcgatgttttcttttttcaggcgggcgatcagcgcggagaaatctttctccccggcggtaataccgtcgaagaagacgacgttggcgttagccgctttcagcccgtcctgcaccgaacgcgccagcccttcgccatactgttgtttgtcgtgaatgatggcgatgcgctggggcttcaccgtctcaagaatgtattttgccgccgttggcccctgggaagagtccagcccggcagtacgcataatgtgttgataaccgcgttgggtcagctccgggttggtcgctcccggcgagatcatcagaataccttcgtcttcatagatatctgacgcaggctgggtagaagaagaacacagatgaccaataacgtatttaatgccgtcattaacgattttgttggcgaccgcaacggcttgtttcgggtcgcatgcgtcgtcatattccacgccaaccagtttatcgcccttaattccccctttggcattaatgtctttaattgcctgacgcgcgccgttaaattccatatcgccccactgggcaatcgggccggacatcgcgccgacaacggcgactttaatatcgtcagccatagcggtgtgtgaaattgccagtgcaatcatccctgcgatgatagttttcgcattccgtttcatagtcaaaaatccccattcgtgatgttgtgttgctttgtttttatgtgttaacaaatcagactgttctttttttatactgcactgtttttgcctgtctgattaaggggttagcgcagtattttgtgataatagcgattaaaatccctatttttcagtcgattaagaacagataatattctgaatttattgatagataaacagaaaaaagtgcctttgtcagcataaaataacggcacaaagggcggaataattcactatcattcaggggattatgctggacatttttcattctctaatgttttaattttgtaattattgctgttaaaaaattaatcacctgccaaaagaaataaaaaagagaaagcctccgattaaattatttcgctacactggttccacttttgtgatttacacgggttacccatgaagctgaccatcattcgattagaaaaatttagcgaccaagaccggattgacctgcaaaagatctggccggagtattccccttcctcgttacaggttgacgataaccaccgtatctacgccgcgcgttttaacgagcgcctgctcgctgccgtgcgggtaaccttaagcggcaccgagggagcactggattccctgcgcgtgcgggaagtcacccgccgtcgcggtgtggggcaatatctgctggaagaggttttgcgtaacaatcctggcgtttcatgctggtggatggcggatgcaggcgtggaagatcgcggtgtgatgacggcgtttatgcaggcgctggggtttacggcacaacagggcggctgggagaagtgttaatcgtcaagtttgatttcaaaagtgatattgcctgatgcgctacgcttatcaggcctacaatgtgtgttgcaatttactgatttctttggatcttgtaggccggataaggcgtttacgccgcatccggcatgaagcaacgtactcgatattagcaatttggcggcaacccaaagttgccgattaatgattacttcgcatcggtcgccgtgccgttggcgtgccagtcaaatacgccgaactcaaagcctttcagatcgcctttctcatcccaggtcagcggtcccattacggtatccacggagttcgctttcaggtatttggcgatttcagccggatcgtcagactgattcaggcccgcctgcaaagattgcagcgcggcgtaggtggtccaaacgaatgcgccacttgggtcctgttttttcgctttgatcgcgtcaacaatgggtttgttcgccggaacctgatcgtagttcttcggcttggtcaccagcagcccttccgctgattcgcccgcaatgttagacagcgaaacgttagccacaccttccggccccataaactgagttttcagccctgccgcgcgtgcctgacgcaggatttgccccatttccgggtgataaccgccgtagtaaacgaagtcgatattctcttttttcagacgcgccaccagcgttgagaaatctttttccccggcggtgatgccatcaaagaacaccacgtttgcattgcctttcttcaggccgtcctgcaccgctcgcgccagaccttcgccgtattgctgtttgtcgtgaacgatagcaatacgctgcggtttcactttctcaagaatatatttcgccgccgtcggcccctggtcggagtccaggccggtggtgcgcaggatcagctgatagccacgggcggtcagctccggcgcggttgccgctggggtgatcattaaaatgccttcgtcttcgtagatgtcagacgcaggctgcgttgatgaagaacagaggtgaccaatcacatatttaatgccgtcgttaacgactttgttcgccaccgcaaccgcctgtttcgggtcacaggcatcgtcatattttacgatttgcagtttgttgcctttaatgccgcctttagcgttgatatccgcaaccgcctgctctgcgccggtaaactcctggtcaccgtactgcgcaaccggaccggacattgcgcccacgaccgcgactttaatatcttctgccagagccatattgctgaatgccagcgcgatacatcctgccagtaacgctttaccctttatgttcatcctgagaatccccattcttctggttattacgtgtgttgtgatgttgtttttcagcactttatttcgttttatgcatgactacccgtgctttagcagcatactctgctaaaacatacccgatttttatgatattggaatagctattttgacagtttattaacaatctgcgtggggattggcgttttgccggaggggaaattgattattacagaggcccaaaaaacaaaaaccccggactctcatccagggttctctgcttaatagcggaaattacgcttcaatggcagcacgcaattttttcatcgcgttcttttccagctggcgtacacgctcagcggaaacgccgtaacggtcagccagttcctgcaacgtggacttgttgtcttcgtccagccagcgcgcacggatgatgtcctggctgcgttcgtccagaccctgcatcgcgtcggtcagacggtttgccgcctgctcttcccagttatcatcttcaatgccgtcggcaaagttagatgatttatcctgcagatagagcaccggagccatcggctggctgtcggaatcgtcgtcggaagacaggtcaaaggtcatgtcctgtgccgccatacgtgattccatctcacgtacgtctttgctggttacgcccagttcacgggccaccatttcgacttcatcctggttaaaccagcccagacgctgcttggttttacgcaggttgaagaacagtttgcgctgcgctttggtggtcgcaactttgacgatacgccagttacgcagaacgtattcgtggatctctgctttgatccagtgaacggcgaaggagaccaggcgcacacccacttccgggttgaaacggcgcactgctttcatcaggccgatgttaccttcctgaatcaaatccgcctgtggcaggccatagcccgcataattacgagcaatatgaacaacaaaccgcaggtgagacaggatcagcgttttagctgcttccagatcgccatggtaatgcagcttttcagccagcgcccgctcctcgtcagccgacaacatcggccacgcgttagctgcccggatgtaggaatccaggttgccaactggggctaaagctaaactttgcattttgtcagtcattcaaatcctctcaatcgatatcttctggcgcttcagtggtagcaacaactgtgccagagcttaagagcaacgaggttatcattcactgttttatcagaccgtgattttatccacaagttcaatgcaagcttgtgaataaattacgcacaaaatgtgacatagagatgaaataccgggaagagacaacggggtctctttccctgctacggaacccattgcagggaaagagtataacacgcttttattattcaggcgtaaagtggcgtaaatgttgtaccgtggcaagccacgctgccacccagccaatcatcgagcataccagcagcaatagcaggcattcatcgaatgataagccattgatatcaaacttcgttccgaaaacctgtgccacttccgcaaccgccgatgacaatcgcagcaccagaatttctgacaaaattaatgacaacaatgcgccagaaaatcccagcagtgcgccaccatacaggaacgggcgcaggatgaatccatctgtcgcaccaatcagtttctgtacgttaatggagtcacggcgagcaaagatactcagacgcacactgttaccgatgacgaggaacacggccgccaccatcaacacgccgatcatcgccgaaacgcgcccgaccagcccggtcaacgccgccagacgggcaaaccagctgtcatccatccgcacttcgtcaatgccgttaatctgcgtgatacgatcacgcagcgtattcagtgattccgtcccctggaaatcgagtttcgggatcaccaccgccactgccggaagcgggttttcttccagcatatccagcgcaccaccaaaaccagaccagttacggaactcacccagtgcgtcttcacgagaaagatagttcactttctccacgccttgctcggcctgcaactgtgccaccacgcccgcagcagcgtcatcgtccagcgttttttgcagataaacagtgatttgcggtgacggataatactgcgtcgccgcctggttaacgtttttgtacaccatataacagacgctgggcagcgtcagagaaatggcgataaccatcaccgttaaaaacgtggcgaacggtttgcttttcagatcctgcaatgcgccgtggaaggcatagcgcacctgttcgttgaaaacgttggttttgcgatttaccggttttggcgaggatttcgcgcgttttggtgcgttacgaccgccgtcgcctgagccgccgaccgatttacggaagcgatcaagacgcccgccaaactgccgaatatgattgattgcatcgcgcttattcatggcccacgcctccatgcaagtgaccatcgctcagggtgagcatgcgataggaacgccgcgagatcaggttgatgtcgtgcgttgccatcaatacggttaccccaacgcggttaaactcttcaaacagacgtaaaatgccttccgacagcgcgtcgtccaggttaccagtcggttcgtccgccagcagtaccgcgggcttgttcaccaccgcgcgggcaatgccaacacgctgttgttcaccgcccgaaagctgaatagggaagttcttcgctttgtccagtagcccgactttatccagcgccgccgacacccggcgacgaatatcgtcaccgctggcaccggcgataatcagcgggatcgccacgttatcgtagacagtacggtccatcagtagatggtgatcctggaaaatcatgccaatctggcggcgcagaaacggaacttcacggtttttcagacgcgtgatgtcatggccgctaaaccagattttcccggcgctgggccgctcaatcccacagatcagcttcaggagggtacttttccctgcgccggaatgaccggtcagaaacgccatctcacccggctgcatatggaacgtaacgccctgcagcgcctgtctcccaccgagataagccttgctgacatgttcaaagcgaatcattgttaatcctctcgggcaaaaagtgcctctataaagtcgtccgccttaaacggacgcaaatcctcaatacgttcgccgacaccaatgtagcggatagggataccaaactggtcagccaccgagaaaattaccccgcctttcgccgtgccgtccagtttcgttagcgtgatgccggttaagccaacggcttcatggaacagtttggcctggcttaccgcgttctgcccggtgctggcatcaatagtcagcataacttcatgcggcgcttcaacgtcgagtttcttcatcacgcggacgattttcttcaactcttccatcaggtgcgatttgttctgcaggcgtccggctgtatcggcaatcaggacgtcgatattacgcgctttagctgcctgaatggcgtcgaagataacagaggcggaatccgccccggtatgctgggcaatcaccggaatattgttgcgctgaccccagacctgaagctgttcaaccgcagctgcacggaaagtatcacccgccgccagcatcaccgatttaccctgctgctcaaactgacgcgccagcttaccaatcgtcgtggttttacccacaccgttgacgcccaccatcaggatcacaaacggcgctttgccttcaacattcagcggctcatcgactttcgccagaatctcgcccatctcttctttcagcaggccatagagcgcctcggcgtcacgaagctgcttgcgggatgcgccttccgtcagattggtgataattttacgtgtggtttccacacccacatcggcgatcaaaagctgctcttccagctcctcaaacagatcatcgtcgatttttttaccgcggaacaggctgataaatccggaaccgagattttctttggtttttaacaggctgcgtttcaggcgcgcgaaaaaaccttctttggtcggtttttcctgctcctgagcgatttcttccaccggctgctcttcttctgccggaggaaccaccatcaccgcctcttctgccgcttcggcagccagcgccgtttccagctcttcgtcggtaatttcttctttagccgcttcttcttccgccgcttcgacaatctctacggtttccgcttcagcctgccactcttctggcgaaaccgcttcggcgttgacgtcttccggcaacggcagctcttcacgttcgatagccactggctccggcgtttcttctacgaccggttccggctgtgcaacgacttccgcttcaggctgcgctttttcactttcagcaacctgttcagtgacttccacaacgtcggcagcaaaagtttccgcctcggcttcagtatgcgcttgcggctgctcttcaacggcttgttcagaggccttcacaggctcttgcgcctgaacgatttcttctacaaccggttgttcattctgaacttctgtctctttttccggggtctgctctttttgaccaaagcccagccaggaaaaaaagccacgttttttttctttcgccatttgcgactacactcctcgctgttgcttcatggcacagcgttaacgctatgtacatagcagctaaaaaaatgatgaaatagtctatcacttaacttaattcacatcaccgcctgcaagtatgtgttatctggcggattgagcaatttatcatgaaaaaaccgaatcattccggcagcggccaaatccgcattattggcgggcagtggcgaggccgtaaactcccggttcctgatagcccaggtctgcgccccaccaccgaccgcgtacgcgaaacgttgtttaactggctggctccggtcattgttgacgcccaatgtctggattgcttcgccgggagcggcgcgctggggctggaagcgttatcgcgctacgctgcgggggcaacgttgattgagatggatcgcgcggtttctcagcagttaattaagaatctggcgacactaaaagcaggcaatgcacgcgtggtgaacagcaacgcgatgtcattcctggcgcaaaaaggtacaccgcataatatcgtgtttgtcgatccaccgttccgccgtggcttgttagaagagacgataaatttactggaagataacggctggctggctgacgaagccctgatttatgtcgaaagcgaagtcgaaaacggtctgcccactgttccagcaaactggtcattacatcgggaaaaagtggcgggtcaggtggcttatcggctgtatcaacgcgaagcacaaggagaaagtgatgctgattaatattggtcgtttgttaatgctctgcgtttggggatttttaatcctcaacctggtgcatcccttcccacgcccgctgaatatcttcgttaacgtggcgctgatttttaccgtgctgatgcatggtatgcagctggcgctattgaaatccactttaccgaaagatggcccgcagatgaccaccgccgaaaaggtacggattttccttttcggcgtgtttgaactgctggcctggcagaagaaatttaaagttaaaaaataaccttattgttcgcctacaaagctgacaaagcgcgttcctttatagctcagcgtacctttatcgcccactgtcagggcgtggtactgctgggcgtcgaggcgaaacgtctgctccattcctccgctttgcggtttgaagcttgcctcatagcgtatactggtgcctgccggagtcacttcctgctggcgcgaacggcgatcgttaatcggtttttcccgcttgttgctcaccaccaccagcttttgctggagcggagccatatcattatcagctttttcccgtcgctgttgcataaaacgaaacgatgcggcgacgacaattaagccaatgataacaataaagaaaagaggtggtttgctcatctttatccctcatcggaaaatgcggaaataagcataccctgccagttatggtgttgtcatccgtccaccctcgccactaaactggaagcaagaccgtaggcattccgcttacgaaaaaataacgaattcaaggaactaagatgctttggtcgtttatcgctgtctgtctttccgcatggctatctgtggatgcatcgtatcgtgggccaacctggcaacgctgggtgtttaaaccgttaacccttcttctcctgctgttactggcctggcaagcgccgatgttcgacgccattagctatctggtgctggcagggctgtgcgcctcactgctgggcgatgcgctaaccctgttgccacgtcaacgtctgatgtacgccatcggcgcgtttttcctctcgcacctgctgtacaccatctatttcgccagtcagatgacgctctctttcttctggcctctaccactggtgctgctggttctgggtgcgctgttactggcgattatctggacgcgcctggaagagtaccgttggcctatctgcacgtttatcggcatgacgctggtgatggtgtggctggcaggtgaactgtggttcttccgtccgaccgctccggcgctctctgcgtttgttggcgcttcgttgctgtttatcagtaactttgtctggctggggagccactatcgccgacgcttccgtgcggataacgcgattgctgcggcctgctactttgccggtcacttcctgatcgtccgctcgctgtatctctgataaaacttgactctggagtcgactccagagtgtatccttcggttaatgagaaaaaacttaaccggaggatgccatgtcgactcctgacaatcacggcaagaaagcccctcaatttgctgcgttcaaaccgctaaccacggtacagaacgccaacgactgttgctgcgacggcgcatgttccagcacgccaactctctctgaaaacgtctccggcacccgctatagctggaaagtcagcggcatggactgcgccgcctgtgcgcgcaaggtagaaaatgccgtgcgccagcttgcaggcgtgaatcaggtgcaggtgttgttcgccaccgaaaaactggtggtcgatgccgacaatgacattcgtgcacaagttgaatctgcgctgcaaaaagcaggctattccctgcgcgatgaacaggccgccgaagaaccgcaagcatcacgcctgaaagagaatctgccgctgattacgctaatcgtgatgatggcaatcagctggggtctggagcagttcaatcatccgttcgggcaactggcgtttatcgcgaccacgctggttgggctgtacccgattgctcgtcaggcattacggttgatcaaatccggcagctacttcgccattgaaaccttaatgagcgtagccgctattggtgcactgtttattggcgcaacggctgaagctgcgatggtgttgctgctgtttttgattggtgaacgactggaaggctgggccgccagccgcgcgcgtcagggcgttagcgcgttaatggcgctgaaaccagaaaccgccacgcgcctgcgtaagggtgagcgggaagaggtggcgattaacagcctgcgccctggcgatgtgattgaagtcgccgcaggtgggcgtttgcctgccgacggtaaactgctctcaccgtttgccagttttgatgaaagcgccctgaccggcgaatccattccggtggagcgcgcaacgggcgataaagtccctgctggtgccaccagcgtagaccgtctggtgacgttggaagtgctgtcagaaccgggagccagcgccattgaccggattctgaaactgatcgaagaagccgaagagcgtcgcgctcccattgagcggtttatcgaccgtttcagccgtatctatacgcccgcgattatggccgtcgctctgctggtgacgctggtgccaccgctgctgtttgccgccagctggcaggagtggatttataaagggctgacgctgctgctgattggctgcccgtgtgcgttagttatctcaacgcctgcggcgattacctccgggctggcggcggcagcgcgtcgtggggcgttgattaaaggcggagcggcgctggaacagctgggtcgtgttactcaggtggcgtttgataaaaccggtacgctgaccgtcggtaaaccgcgcgttaccgcgattcatccggcaacgggtattagtgaatctgaactgctgacactggcggcggcggtcgagcaaggcgcgacgcatccactggcgcaagccatcgtacgcgaagcacaggttgctgaactcgccattcccaccgccgaatcacagcgggcgctggtcgggtctggcattgaagcgcaggttaacggtgagcgcgtattgatttgcgctgccgggaaacatcccgctgatgcatttactggtttaattaacgaactggaaagcgccgggcaaacggtagtgctggtagtacgtaacgatgacgtgcttggtgtcattgcgttacaggataccctgcgcgccgatgctgcaactgccatcagtgaactgaacgcgctgggcgtcaaaggggtgatcctcaccggcgataatccacgcgcagcggcggcaattgccggggagctggggctggagtttaaagcgggcctgttgccggaagataaagtcaaagcggtgaccgagctgaatcaacatgcgccgctggcgatggtcggtgacggtattaacgacgcgccagcgatgaaagctgccgccatcgggattgcaatgggtagcggcacagacgtggcgctggaaaccgccgacgcagcattaacccataaccacctgcgcggcctggtgcaaatgattgaactggcacgcgccactcacgccaatatccgccagaacatcactattgcgctggggctgaaagggatcttcctcgtcaccacgctgttagggatgaccgggttgtggctggcagtgctggcagatacgggggcgacggtgctggtgacagcgaatgcgttaagattgttgcgcaggagataaggcaaaccgatcgcaacattgagcgcgatcggtcccctcgcccctctggggagagggttagggtgaggggaaaaggcggcatcgaagccaatcagcccctatcaaccgcctttacgaatcaaataacgataaggcagtccatccgtctctttagcaaccagttcgtgttccataaaggtacaaaacccaggaatatcgcgggtagtggccggatcgtcggcgataatcagcaacgtttcgccaggctgcatattgcgcacggttttgcgcaccatcatcaccggttccgggcagcgcaggccaagcgcgtcgagtgtgtggtcagggctggaaaagagatcggtcattttcttctcatcacttaaaaaaacggcgctagtttacgccctgtgagtccgtaagcaaactaggttaacgattgcgtgaaaattaaccattgcattgtcaacgtaaagcagtatcatgcggcggctcgaaaaaagggtaagcacgttattatgttaaggtaacagacgtgtcgtacgtattgggttccctcaccccaatggttaatcaaaaaggtacaatatgaacgttttctcgcaaactcaacgctataaggcgttgttctggttatcgttatttcatctgctggtgatcacctccagtaactatctggttcagcttcccgtctccattttgggtttccataccacctggggcgcgtttagctttccgtttatttttcttgctaccgacctgaccgtgcgtatttttggcgcaccgctggcccgacgcattatcttcgcggtaatgatccctgcgttattaatctcctacgtcatctcgtcgctattctatatgggttcctggcagggattcggcgcactcgcccacttcaacctgtttgtcgcccgtatcgccaccgccagtttcatggcctacgcgctggggcaaatcctcgacgtgcacgtttttaaccgcctgcgtcagagtcgccgctggtggctggcaccgacagcgtccacactgttcggtaacgtcagcgacacgctggcctttttcttcattgccttctggcgtagcccggatgcctttatggctgaacactggatggaaatcgcgctggtcgattactgtttcaaagtgttaatcagtatcgttttcttcctgccaatgtatggcgtattactcaatatgctgttgaaaagactggcagataaatccgaaatcaacgctttgcaggcgagttaaaggttcgttatcagagttgtgataagatggatgaatgagccgttatggccgtttatcgaaaggaagaagtcaatgcgcaatctggttaaatatgtcggaattggcctgctggttatggggcttgcggcctgtgatgataaagacactaacgctacggcgcagggttcggtcgcggaaagtaacgctaccgggaatcccgtcaacctgcttgatggcaagttaagtttctcgctgccagcggatatgaccgaccagagcggtaagctgggaacgcaggccaataacatgcatgtctggtccgacgccaccgggcagaaagcagtcatcgtcatcatgggcgatgatccgaaagaagatctggcggtgctggcgaagcgtctggaagatcagcaacgtagccgcgatccgcagctgcaagtggtaaccaataaagccattgagctgaaaggtcacaaaatgcagcagttagacagtattatctccgcgaaaggccagacggcgtactcttccgttattctgggtaacgtgggtaatcaactgctgaccatgcaaattacgctgcccgctgacgatcagcaaaaagcgcagaccaccgcagaaaacatcattaatacgctggttattcagtaagttttaagatgatgaggcggcctcagggacgtgttccggaggccgtttttttaatcgccacgtcagtaataacgcgattgcgaccagtcccgccgccgccagataaatcaccggtacgcccgcccagctcatcaccagcccagccagtggtccagtcacgccaagcgataaatccataaatacggtgtaagttgccagcgccgccccctgattttgctgcggaaccgcttttaccgccactacacccaatgccgggaacaccagcgaaaacccggcccccgccagtaagacgccgattttcgccatccacggcatagtcgccacgccaaccagtagcaggccgattatctcaacgctaaagcaaatcatcgctacgtttaagccaccgatacggttaatgccgttagggaataacaaacgcgtaccgacaaacgcacagctaaacagcgtcagcgcgaaagccgcaccgtcccaacctttagcgtcataaaacagcgtgataaaggtggcgatgacgccaaatccggcggaagccagtgccagcgccataccgtacagccagacgcgcccaagcaccgcgcgaaacggcagcggtttgcctttactggcttttaccgtcggacgcgggatcgccaacaaaatggccaccagcgccacgcccataatgattaacgctaacgcctgcaagccgccccagtgataaaacacgacgcctaacggcgcacccatcgccatcgccccgtaagtgacaatgccgttccacgaaatcacccgcccgatatgcagcgagccaaccacgccaacgccccatagggtcgatcccgttccggcaaaactttgcccaatcccaaggatgacgcgccccaggcaaagtaataacaggctgatgacaggcagactggcggttaatcctgccgtcagataccccagaccgctcaaaaagcagccgcataaaccgaagacgacaatctttttgggtcccagcgaatcggcgtaacgtccggcatgagggcggctcagcaaggtggcgaaatattgcaggctgataaccaatcctgcccagaaggcgctaaagcccatcacatcatggacatagcccggtaatacagcgagcggcaacccgatggtgaggtagctggcgaagttaaacatgactatagagacaatgcgcaaattcaggcgcaatccgtttagcgcgggttcggctacgggttcgggcatgaggatcaccacatttttacaacagtgtttcatttttaccacgtgctgacgtgaaaatcagcagtaagaatcagaatattgctggcgtgactcccgctacacttaatacaaaaagtcacaaggaagccccaatggaaacccctcaacccgataaaacgggcatgcacattctgctcaagctggcctcgctggtagtgatcctcgcgggcattcacgcagcggcagatatcattgtgcagctgttactggcgctgttttttgccatcgtcctcaacccgctcgtcacctggtttattcgtcggggagtacaacgccccgttgccattacgattgtagtggtggtgatgctgatcgcactaaccgcgctggtcggcgtactggcggcatcgtttaacgaatttatctctatgctgccgaagtttaataaggagctgacgcgcaaactttttaaattgcaggagatgttgccttttcttaatttgcatatgtcgccggagcgaatgctgcagcggatggactcggaaaaagtggttaccttcaccacagcgctaatgaccgggctttccggggcaatggcgagcgtgcttttgctggtgatgaccgtagtttttatgctgtttgaagtgcgccacgtcccttacaaaatgcgttttgcgctgaataatccacagattcacatcgcgggattacaccgcgcacttaaaggcgtttcgcactatcttgcattgaagacgctactcagtttatggacaggtgtcatcgtctggctggggctggagctgatgggggtgcagtttgcgctgatgtgggcagtactggcgtttttgctcaactacgtgcccaatatcggcgcggtaatttccgccgtaccgccaatgattcaggtgctgctgtttaatggtgtttacgaatgtattctggtcggcgcattgtttttagtggtccatatggtcatcggcaatattttagaaccacggatgatgggccatcgcctggggatgtccaccatggtggtatttctttcattgttaatttggggatggctgctcggcccggtagggatgctactttcggtgccattaaccagcgtgtgtaaaatctggatggaaaccaccaaaggcggtagcaaactggcgattttactggggccgggcagaccgaaaagtcggttaccgggatgaggcgacaagtgatacgatacgcactttcattttccattaaacgttggccctgatatgtatcggatagttctggggaaagtttcgaccttaagcgcagctccactgccaccgggtttacgcgagcaagcaccgcaaggtccacgacgcgaacgctggctggcggggcgtgcattgctttcgcacacgctttccccgctaccggagatcatctatggcgaacaaggcaaacctgcatttgcgccggaaatgccgctatggttcaacttaagccatagcggtgacgatatcgccctgctgttgagtgatgaaggcgaagtcggctgcgatatcgaagtgattcgcccgcgcgccaactggcgctggctggcgaacgccgtattcagcctcggggaacacgctgagatggacgccgtgcatcctgatcagcaactggaaatgttctggcgcatctggacgcgcaaagaagccatcgttaaacagcgtggcggcagcgcctggcaaatcgtcagcgtagacagcacctatcactcctcgctgtcagtcagccattgtcagcttgaaaatttaagccttgcgatctgcacccctactccctttacgctcaccgccgacagtgtgcaatggatcgattcagttaactgatccgcccacccgactgcccatctattgatccagaacaggtaatcagtatgacgaatacttaaaatcgtcatacttatttccgccatctattttaatccattggggttaccatgctctccacactccgccgcactctatttgcgctgctggcttgtgcgtcttttatcgtccatgccgctgcaccagatgaaatcaccaccgcctggccggtgaatgtcgggccactaaacccgcacctttacacgcctaaccagatgttcgcccagagcatggtttatgaaccattggtgaaatatcaggcagacggttcggtgatcccgtggctggcaaaaagctggactcattcagaagatggtaaaacctggaccttcaccctgcgtgatgacgtgaaattctccaacggtgaaccgttcgatgccgaggcggcggcagaaaacttccgcgcagtgctcgataaccgtcaacgtcacgcctggctggagctggcaaaccagattgttgatgttaaagcactcagtaaaacagagctgcaaattaccctgaaaagcgcctactatcctttcctgcaagaactggccctgccccgtcctttccgttttatcgctccctcgcagtttaaaaaccatgaaaccatgaacggaattaaagcgccgattggcaccggaccgtggattttgcaggaatcgaaactgaatcagtacgatgtcttcgtccgtaacgaaaactactggggcgaaaagccagcgattaaaaagatcacctttaacgtcatcccggacccgactacccgcgcggtggcgtttgaaactggcgatatcgacctgctgtacggaaacgaagggttattaccgctcgataccttcgcccgctttagccagaatccggcttaccacacccaactgtcacagccgatcgaaaccgtgatgctggcgctcaataccgccaaagcccccaccaacgagctggcagtacgtgaagctcttaattacgcggtaaacaaaaaatcgctgattgataacgcgttgtatggcacccagcaggtcgccgacaccctgtttgccccttctgtgccctacgccaacctcggcctgaaaccgagccagtacgatccgcaaaaagcgaaagcgttgctggaaaaagccggttggacgctgcctgcgggcaaagacatccgcgagaaaaatggtcagccgctgcgcattgaactttcgttcatcggcaccgatgcgttaagcaaatcgatggcggaaatcattcaggctgatatgcgccagattggcgcagatgtctcgctgattggcgaagaagagagcagtatctatgctcgtcagcgcgacggtcgttttggcatgattttccaccgcacctggggcgcgccatatgatccacacgccttcctcagttcaatgcgcgtaccgtcacacgctgacttccaggcacagcaaggattagccgacaaaccgctgattgataaagagatcggcgaagtgctggcgacccatgacgaaacgcaacgtcaggcgctgtatcgcgacattctgacccgtctgcatgacgaggcggtttatctgcctatcagttacatctcaatgatggtggtatcaaaaccggagctgggtaacatcccctacgcgccgatcgccaccgaaattccgttcgaacagattaaaccggtgaaaccttaatgttgcgttacgtattacgccgctttctgctgctgatcccgatggtgctcgccgcctcggtgatcatttttctgatgctgcgcctcggtaccggcgacccggcgctcgattatttgcgtctgtctaacctgccgccgacgccggagatgctggcctctacccgcaccatgctgggactggatcagccgctgtacgtccagtacggcacctggttgtggaaggcgctgcatcttgactttggtatctcattcgccagccaacgcccggtactggacgatatgctgaacttcctgcccgccacgctggaacttgcaggtgcggcgctggtattaattctgctcacttccgtaccgctcggtatctgggcggcgcgccatcgcgaccgtctgccggatttcgccgtacgtttcatcgcgtttcttggcgtgtcgatgcctaacttctggctggcgtttttactggtgatggcgttttcggtgtatctgcaatggctacccgcgatgggttacggcggctggcagcacatcattttgcctgcggtttccattgcctttatgtcgctggcgattaacgcgcgtttactgcgcgccagtatgctggacgtcgccggtcagcgtcacgtcacctgggcgcgtctgcgcggcctgaacgacaaacagaccgaacgtcgccacatcctgcgcaatgcctcgctgccgatgatcaccgccgtggggatgcatatcggcgaactgattggcgggacgatgattatcgaaaacatctttgcctggccgggcgtcgggcgctatgcggtgtcggcgatttttaaccgtgactatccggtgatccagtgctttacgctgatgatggtggtggtttttgtggtctgtaatttgattgtcgatttgctcaacgccgcgctggacccgcgcattcgtcgtcatgaaggagcgcacgcgtgaactttttcctctcttcccgctggtcggtacgcctggcgctgatcattatcgccctgctggcgctgattgcgctcaccagccagtggtggctgccgtatgacccacaggcgattgatttgccgtcgcgcctgctttcgccggatgcgcagcactggctgggcaccgatcacttaggtcgcgatattttctcgcggctgatggcagcgacccgcgtgtcgctcggttcggtaatggcctgcctgctgctggtgctgacattagggctggttattggcggcagcgccgggttgattggcgggcgcgttgatcaggccaccatgcgcgtcgccgatatgtttatgaccttcccgacctcgattctgtcgttctttatggttggcgtgctcggcaccgggctgaccaacgtaattatcgccatcgccctgtcgcactgggcgtggtatgcacgcatggtgcgcagcctggtgatttcactacgccaacgcgagtttgtgctggcgtcacggctttccggtgcgggccatgtgcgggtgtttgtcgatcatctggcaggcgcggtgatcccttcgctgctggtgctggcaacgctggatatcggccatatgatgctgcacgtcgcggggatgtctttccttggcctcggtgtgaccgcgccgaccgccgaatggggcgtgatgattaacgacgcgcgccagtatatctggacccagccgctgcaaatgttctggccggggctggcgctgtttatcagcgtgatggcctttaacctggtgggtgacgcactgcgcgatcatctggaccctcatctggtgacggagcacgcacactaatgccgcaacagattgaactacgtaatatcgcgctacaggccgcgcagccgctggtacacggtgtatcgttaaccctgcaacgcgggcgcgtgctggcgttagtcggcggtagcggcagcgggaaatcattaacctgcgccgcaacgctgggcattttgcccgctggcgttcgccagacggcgggggaaattttagccgatggcaaaccggtttcgccttgcgccctgcgcggcatcaaaattgccaccatcatgcagaacccgcgcagcgcctttaatccactgcacaccatgcacacccacgcgcgggaaacctgcctggcgttagggaaacccgccgatgacgctacgcttaccgctgccatagaagcggtggggctggaaaacgccgcgcgcgtgctgaagctgtacccgttcgagatgagcggcggcatgttgcagcgcatgatgattgcgatggcggtgctgtgtgaatcaccgtttatcatcgccgatgaaccgaccaccgaccttgacgtggtagcacaggcgcgcatcctcgatctgctggaaagcattatgcaaaaacaagcgccgggaatgctgctggtgacccatgatatgggcgttgtggcgcgtctggcggatgacgtggcggtgatgtctgacggtaagattgtcgaacagggcgatgtagaaacgctgtttaacgcccccaaacatacagtgacgcgcagcctggtttccgctcatctcgccctctacggtatggagctggcatcatgactttacttaacatctccggcctttcccatcactatgcgcacggtggatttaacggaaaacatcaacatcaggcggtgctgaataacgtttccctgaccctgaaaagcggcgaaaccgtcgccctgctggggcgcagcggctgcgggaaaagtaccctcgcgcggttgctggtgggtttagaatcgcccgcgcaggggaatattagctggcgtggcgaaccgctggcgaaactcaatcgcgcccagcgtaaagcgttccgccgcgatattcagatggtatttcaggactccatcagcgccgtgaatccgcgcaaaaccgtgcgcgagatcctgcgtgaaccgatgcgccacctgctatcactgaaaaaatccgaacaactggcgcgcgccagcgaaatgctgaaggcggtcgatctcgatgacagcgttctcgacaaacgcccaccgcagttaagcggcggccagctccagcgcgtctgcctggctcgcgcgctggcggtcgaaccgaaactactgattctggatgaagccgtttctaaccttgatctcgtgttacaggcgggtgtcattcgcctgctgaaaaagctacaacaacagtttggcaccgcctgcctgttcatcacccacgacttacgcctggtagaacgcttttgccagcgggtaatggttatggacaacggacaaatcgtcgaaacccaggtggtgggagagaaattaaccttttcctctgacgccggacgtgtgctacaaaacgcggtattacccgcattccccgtgcgccgtcgcaccacagaaaaggtttaacgcaaatgcaacgagtcaccatcacgcttgatgacgatttactggagacgctggacagcctgagccagcgtcgtggttataacaaccgttccgaagctatccgcgacattctgcgtagcgccctggcgcaagaggccacccagcagcacggcacgcaaggtttcgcggtgctgtcgtatgtgtatgaacacgaaaaacgcgacttagccagccgcattgtctccacccagcatcatcaccacgacctctccgtcgccacgctgcatgtgcacatcaaccacgacgactgtctggaaatcgccgtgttgaaaggtgacatgggtgacgtgcagcattttgccgatgacgttatcgcccagcgcggcgtgcggcacgggcatttgcagtgcttgccgaaggaagattgagtctattattgggtcctttggtgaacgatcaacaaagggccactagcacacctgattcctctctaaataccctatccgaaccttctcttttgtaacgttctaaatatattcctaaaaatcttcaattcattgtgaccacaagtttttcttcgctttttcgtatgaagatactgtcattaaaataatagaaaaggattttacgatgagcggaaaaccggcggcgcgtcagggtgacatgacgcagtatggcggtagcattgttcagggttcagccggggtacgtattggtgcccccaccggcgtggcctgttcggtgtgccccggcggagtgacgtccggccatccggtcaatcccctgctcggtgcaaaggtccttcccggtgaaaccgacatcgccctgcccggcccgctgccgttcatcctctcccgcacctacagcagttaccggacaaaaacgcccgcgccggtggggagcctcggccccggctggaaaatgcctgcggatatccgcttacagctgcgcgataacacactgatactcagtgataacggcggcagaagcctgtattttgagcacctgtttcccggtgaggacggttacagccgcagcgagtcactgtggctggtgcgcggcggcgtggcgaaactggatgaaggtcaccggctggccgcactctggcaggcgctgccggaagaactccgcttaagtccgcatcgttatctggcgacaaacagtccgcaggggccgtggtggctgctcggttggtgtgagcgggtgccggaagcggatgaggtgctgcctgcgccgctgccgccgtaccgggtactgaccgggctggtggaccgcttcgggcgcacacagacgttccaccgcgaagccgccggtgaattcagcggcgaaatcaccggcgtgacggatggtgcctggcgtcacttccggctggtactgaccacgcaggcgcagcgggcagaagaagcccggcagcaggccatttccggcgggacggaaccgtccgcttttcctgataccctgccgggttacaccgaatatggccgggacaacggcatccgtctgtctgccgtgtggctgacgcacgacccggaatacccggagaatttacctgccgcgccgctggtgcgctatggctggacgccacgcggcgaactggcggtggtgtatgaccgtagtggcaaacaggtgcgcagctttacttacgatgataaataccggggccggatggtggcgcaccgtcacacgggccggccggaaatccgttaccgttacgacagcgacgggcgggtgacagaacagctaaacccggcaggcttaagctacacgtatcagtatgagaaagaccgcatcaccatcaccgacagcctggaccgccgtgaagtgctgcacacgcagggcgaagccgggctgaagcgggtggtgaaaaaggaacacgcggacggcagcgtcacgcagagtcagtttgacgccgtgggcaggctcagggcacagacggatgccgcaggcaggacaacagagtacagcccggatgtggtgacgggcctcatcacgcgcataaccacgccggatggcagggcatcggcgttttactataaccaccacaaccagttaacgtcagccaccgggcctgacgggctggaattgcgccgggaatatgatgaattgggccgtctgattcaggaaactgcccctgacggcgatatcacccgctaccgttatgataatccacacagtgacttaccctgcgcaacggaagatgccaccggcagccggaaaaccatgacgtggagccgttacggtcagttgctgagcttcaccgactgttccggttatgtaacccgttatgaccatgaccgcttcgggcagatgacggcggtgcaccgcgaggaagggctgagtcagtaccgcgcatacgacagccgtggacagttaattgccgtgaaagacacgcagggccatgaaacgcggtatgaatacaacatcgccggtgacctgaccgccgtcattgccccggacggcagcagaaacgggacacagtacgatgcgtggggaaaggccgtccgtaccacgcagggcgggctgacgcgcagtatggaatacgatgctgccggacgggtcatccgcctgaccagtgaaaacggcagccacaccaccttccgttacgatgtacttgaccggctgatacaggaaaccggctttgacggccgcacacagcgttatcaccacgacctgaccggcaaacttatccgcagcgaggatgagggtctggtcacccactggcactatgacgaagcagaccgcctcacgcaccgcaccgtgaagggtgaaaccgcagagcggtggcagtatgacgaacgtggctggctgacagacatcagccatatcagcgaagggcaccgggtggcggtgcattacaggtatgatgagaaaggccggctgaccggtgagcgtcagacggtgcatcacccgcagacggaagcactgctctggcagcatgagaccagacatgcgtacaacgcgcaggggctggcgaaccgctgtataccggacagcctgcccgccgtggaatggctgacctacggcagcggttacctggcaggcatgaaactcggcgacacaccgctggtggagtacacccgcgaccgcctgcaccgggaaacgctgcgcagcttcggccgttatgaactcaccaccgcttatacccctgccgggcagttacagagccagcacctgaacagcctgctgtctgaccgcgattacacctggaacgacaacggcgaactcatccgcatcagcagcccgcgccagacccggagttacagctacagcaccaccggcaggctgaccggcgttcacaccaccgcagcgaatctggatatccgcatcccgtatgccacagacccggcaggtaaccgcctgcccgacccggagctgcacccggacagcaccctcagcatgtggccggataaccgtatcgcccgtgacgcgcactatctttaccggtatgaccgtcacggcaggctgacagagaaaaccgacctcatcccggaaggggttatccgcacggatgatgagcggactcaccggtaccattacgacagtcagcaccggctggtgcactacacgcggacacaatatgaagagccgctggtcgaaagtcgctatctttacgacccgctgggccgcagggtggcaaaacgggtgtggcggcgtgaacgggacctgacgggctggatgtcgctgtcacggaaaccgcaagtgacctggtacggctgggacggcgaccggctgaccacgatacagaacgacaggagccgcatccagacgatttatcagccggggagcttcacgccactcatcagggtcgaaactgccaccggtgagctggcgaaaacgcagcgccgcagcctggcggatgcccttcagcagtccggcggcgaagacggtggcagtgtggtgttcccgccggtgctggtgcagatgctcgaccggctggaaagtgaaatcctggctgaccgggtgagtgaggaaagccgccgctggctggcatcgtgcggcctgaccgtggagcagatgaaaaaccagatggacccggtgtacacgccggcgcgaaaaatccacctgtaccactgcgaccatcgcggcctgccgctggcgctcatcagcacggaaggggcaacagcgtggtgcgcagaatatgatgaatggggcaacctgctgaatgaagagaacccgcatcagctgcagcagcttatccggctgccggggcagcagtatgatgaggagtccggcctgtattacaaccgccaccgctattatgacccgctgcaggggcgatatatcactcaggatccgattggactgaaggggggatggaacctgtatggatatcaattgaatccgatatcagacatcgaccccctgggtttatctatgtgggaggatgcaaaatcgggggcatgtactaatggtctttgcggcacactatccgctatgataggtccagataaatttgattctatagatagcaccgcatatgacgccttaaataaaataaatagccaatctatttgcgaagataaagagttcgctggtttaatatgtaaggataatagtggcagatatttctcaacagcacctaaccgaggagaaagaaaaggatcatatccattcaatagcccttgccctaatggtactgagaaagtatcagcttatcatactcatggtgcagatagtcatggagaatattgggacgaaatattttcaggtaaagatgagaaaatagttaaaagtaaagataacaatatcaagtcattttatttaggtacgcccagtggtaattttaaagcaatagataaccacgggaaggaaataacaaacagaaaaggattacctaatgtctgcagagttcatggtaatatgtaaaaaaatattgtttaggaactgtgtcattgtatctttgtttgtttttacatacaacacatgggcgcagtgtaataataatattaaaataatgcgcaagtatgaaagtgaaggtaaatataccgttagaaatttggttaaaaataaagctatagcattggaattagctgagatatatgttaagaatcgttatggacaggatgccgcagaagaagaaaaaccatacgaaatcactgagttaacaacaagttgggttgttgaaggtaccattcactcagaccaaattgctggtggggtttttattatagaaataggcaaaaatgatgggagaattctgaattttggccacggaaaataagtatgtaaggataatcaaacatcgtgtgcgctgatggcagagtaggtggaggactccagacagtcaaacgatagaaaaagatagcctttatggaggttcctgcaatgtcaaatacataccagaaaagaaaggcaagtaaagagtatggtttatataataaatgtaagaaactaaatgatgatgaattatttcgcttacttgatgatcgcaattccttgaaaaggatttcatctgccagagtattacagttaagaggggggcaagacgctgttagattggcaattgaattctgcactgacaaaaattatatccgtagagatatcggagcatttatactcgggcaaatataaatttgcaaaaaatgcgaagataatgtttttaatattttgaacaatatggcattgaatgataagagtgcttgcgttcgagctacggcaatcgagtcaacggccagggaaagatcatcaaaagttcactttttgcactaaataattcgcattttatgtttaaaaattgagatattccttattacctgaagctgttttttattgcttatacatgatcaaatactccttacctaattaaggagaacaaaatggaacttaaaaaattgatggaacatatttctattatccccgattacagacaaacctggaaagtggaacataaattatcggatattctactgttgactatttgtgccgttatttctggtgcagaaggttgggaagatatagaggattttggggaaacacatctcgattttttgaagcaatatggtgattttgaaaatggtattcctgttcacgataccattgccagagttgtatcctgtatcagtcctgcaaaatttcacgagtgctttattaactggatgcgtgactgccattcttcagatgataaagacgtcattgcaattgatggaaaaacgctccggcactcttatgacaagagtcgccgcaggggagcgattcatgtcattagtgcgttctcaacaatgcacagtctggtcatcggacagatcaagacggatgagaaatctaatgagattacagctatcccagaacttcttaacatgctggatattaaaggaaaaatcatcacaactgatgcgatgggttgccagaaagatattgcagagaagatacaaaaacagggaggtgattatttattcgcggtaaaaggaacccaggggcggctaaataaagcctttgaggaaaaatttccgctgaaagaattaaataatccagagcatgacagttacgcaatcagtgaaaagagtcacggcagagaagaaatccgtcttcatattgtttgcgatgtccctgatgaacttattgatttcacgtttgaatggaaagggctgaagaaattatgcgtggcagtctcctttcggtccataatagcagaacaaaagaaagagccagaaatgacggtcagatattatatcagttctgctgatttaaccgctgagaaattcgccacagcgatccgaaatcactggcacgtggagaataagctgcactggcgtctggacgtggtaatgaatgaagacgactgcaaaataagaagaggaaatgcagcagaattattttcagggatacggcacattgctattaatattttgacgaatgataaggtattcaaggcagggttaagacgtaagatgcgaaaagcagccatggacagaaactatctggcgtcagtccttgcggggagcgggctttcgtaatcttgccctgaatacaggactgagtatcaaaaagccggttaactgaaactgtccaggttttgggggtcagttcataaacgccttatccggcctaaaaacaactaaaattcaataaattgcaccgatgcgtagtccctataagcttacgcatcgggcaattgtatttacgccattgtcccaatcgtcttcctgaatcgcagcagcgcaatggtgaaaaatgcgccgccaattgccatcagcgtcagaaactgcggccagacgatttcgaatccggcaccccggtagaggatggcctgcgcgaggctaacaaagtgtgtcgtcggcatggtcagcataatgtcctgcaccatctgcggcatactttcgcgcggcgtggaaccaccggaaagcatttgcagcggcagcagcaccagaatcaccagcagccccagttgcggcattgaacgcgctatcgtccccataaaaatgccgattgacgtggtggcaaacagactgagcgccacgcccagcataaacagcgggatcgagccttcaatcggtacgcccagtacacctttcaccatcagcaccagcgataatcccgataccaccagcaccaccagccccatcgaccagatcttcgccatcatgatctcaaacggcgttatcggcatcaccagtaagtgttccaccgtgccgtgttcacgctcgcggatcagcgccgatccggtcaatacaatcgccagcatggtaatgttgttgatgatcgccatcaccccgccaaaccacgcgggatcgaggttcgggttaaagcgcatccgggtttccagcgataccaacggttcgctgttatcacggtagcgcgcgacaaagctgttcacttcaccgttgataatattctggatatacccattgccggtaaatgcctggctcatgcgcgtggcatcgacgttcacctgaatatccggctggcgtccggcgaggacatcacgctgaaaattaggcggaatatttatcgcgaaggtatagcgtccggcgtccagtccggcatccatctcatcggcggtgatcatctccggtggcaaaaaccacggacgatagaagctgttaacgatccggttcgataactgcgattgatccatatcggcaatggcgatcggcgcgaggttcaacgatcctggcgtaacggtcgctgacgaatacaccgacaccgtaaacgagaagacaatcagcgtcagcatcgctttatcaccgagcagactgcgcaactctttgatacccagattaaaaatattgcgtaaatggcgcatcatccctcctgttttttcagcagcaggatacttaagcccatcaccagcgggatggctatcagtaacgggataaaaagttgccacaaatcagtcagatccagcgctttcgagaacgtcccgcgggcgatagtcagaaaatgactggtcgggtaaacctcgccgatccaacgtccaggcccttccagcgaagctaccggatcgatcatcccggaaaactgtgtcgccgggatcaacgtgataatcgccgttccgaaaatggcggcaatctggcttttcataaaggtggagatcagcagccccattccggtggcaatgatgatatacagcagcgccgccagggtgagcgtcaggaaactgcctttatgcggtacgccaaacacaaacaccgacaggccgcagagcaggaaaaagttcagcatccccagcgcgatgtatggcaactgtttaccaagcaaaaattcactacgcgtggtgggggtcacgtaaaggttgataatcgacccaagctctttttcccgcaccacgctaagggcgcttagcattgacgggatcatcatcagcagaagcgggatcaccgccggaacaatcgctggcaggctttttacgtccgggttatagcgatagcgcgtctcaatattcatcagcccgctttggctggcgggtgtcgattgtcggctcgccacatcctgtaaccagctctggtgcatggcctgcacgtaaccttttaccgtttcagcacggctcggcatcgctccgtcgatccagacgccgagttccacaggcgtaccacgcgcgatatcgcgcccgaaattgggcgggatctcaatcgccaccgtgatatcgcccgcacgcatccgacgatcaagctcgtcataactggtgagcggcggctgttcgataaagtaacgggaaccggagaggttgagtgtccacgcctggctactgacggtctggtcgcggtcgagcaccgcaaagcgcaggttttccacatccatactgatgccgtaacccattatcagcatcaggatcaccgttcccatcagcgccagcgtcgaacgtactggatcgcgtcgcagttccagcgcttcgcggcggctgtagctaaacagacggcgcaggctaaatccctgacgcggcgcgtgggtggtgtcgtgtaccacgggcggcgcttcggcttcgttgctctgccctgccgcttcctgcaaataggcgataaatgcctcttccagactggcggctccgcgtttctcaaccagttcctgcggtgtaccgctggcaagcacttttccggcgtgcatcagtgagatgcggtcgcaacgttccgcttcgttcataaagtgggtggagatgaagatagtcactttgtcctggcgcgagagatcgaccatcaactgccagaacatatccctcgccaccggatcgacaccagaagtaggctcatcgaggattaacatctccgggcgatgaatcaccgccaccgccagcgaaagccgctggcgaatgccgagcggcaatgactccggcagaatatcttcaacgtcgttgagcttaaaacgctcgctcatttcagccactcttgcgggaatttccgcttccgggatgtgaaacaaacgggcatgtaactcaaggttttgccgcacggtgagttcgttatagagcgaaaacgcctgcgacatatagcccacccgacggcgggtatcgatatcttttggatcaaccggttgcccgaacagccacgcctcaccttcgctggcgggcagcagtccggtgagcattttcatggtggtggatttaccgcagccgttcgaaccaagaaaaccaaaaatctccccgcgtggaatgcggaaattaacgtgatcaacggcaacgaaggaaccaaaacgcatggtcagatcgcgcgcttcgatggcaatctctgcgttttcaggttgatacggtgggatcactaccgcctgatgcgcctggcgttgcgcttgcggtaacagatttataaatgcttcttccagcgtagcgctttgcgtttgctgccgtagctcttcggcgctgccagttgccagcacttctccggcattcatcgctaccagccagtcgaagcgttcggcctcttccatataggcggtggcgaccagcacgctcatattgctctgccgctggcgaatactgtcgatcagatcccagaactgggagcgggagagcgggtcaacccccgttgttggctcatcaaggatcaacagttccgggtcgtggattaacgcgcagcacagcccaagtttttgcttcatcccgccggagagtttccctgccggacgatcgcgaaacggtgctaacccggtgctggtcagcagctcattgattcgcacttcccgctccgctttgtcgtgaccgaacaggcgagcgaaaaaatcgacgttttcatacaccgacaaggtgtggtagaggtttttgcccagcccctgcggcatccaggcgatgcgcgggcagacgtcgcggcgatgcttcgggtcgcgcatatcgccgcccagcaccatcacattgccctgttcaatgacgcgggcaccggaaatcaacgacaacaagctcgacttcccgacgccgtccgggccaatcagcccgaccatacagcgggccggaatatcgagagtgatattgttcagcgcaacggtttttccataatgctggctcacgcccgccagttgcgcgacaggcggacgggaaccagttccagatgcgtcattgcggcaacctcaccacgaggtcgtcaggccacggaagttcttcattcacccgcacccacgctacgcccggcaaaccggttttgacatattccagatgctgctggagtaattccggtgggatacgcgctttgacgcggaacatcagtttcagccgttcatcgctggtttcgacggtttttggcgtgaactgggcgacactggcgacaaaactgatggttgcaggaatacgcagatctggcgcggcatcgaggatcagccgggcttcaccgcccagtttcagcgtgcccgcctgttcggttggcaggaagaaagtcatatagacgtcgctgagatcgaccatattcagcacccgaccgcctgccgccagcacttcgcctggctcggcaacccgatactgcacgcgtccgtcacgcggggctttcagttcgctgtcatcgatatctgcggcaatgcgccgttcagtggcttgtgccgcttcgacgcgggtttgcgcctgaatgatattggtgcgtgccgcttctatagccgctttagaagccgatacctgagctttcgccgattccagcgcagctcgggcgctctcagcggcggcgcgatcgtcatccagctgttgcgcagaaatagcccctcgttgggccagtgaacgggaacgcgtatgacgttttgctacggagtccagttctgcctggcgttgattaaccagcgactgtgcggcacgagtttcgctttgtcgttgctccagcaaagcctgcgcggcagcaacggcgctttgtgcctctttgatttgcgcgatggcttccagtcgctgttcctgcaacacgcgagtatccatcttcgccagcacttcaccttcgcgaacaaacttgccttctttcaccagaatggtgtcgatacgcccggcaattttgctggcaatatccacttccgtcgcttcaatgcgcccattactgacagcaaagccttccggcacacctgccgggcgcaacagccaccacgccacgatagccgccaccgccagtaacccgacaacccaccacgccagatggcgcttactcttatccataatcgacccgccataatccctgtaagcaaacgacgcgtgttacaactgccgccgaacgacgttcagcggattcttccatccgggataagaaggaaacggcaaatacgaccagcgcgcagagcattgagcgccaacggggaaggcttagtgaaaacgggtagtaatgttgtcatcatcagcattcctggccgtaaatgaaacacgcatactcataagtgtgatctataaaactggctgacaaaacggtatccatcctgttggatagcgtttcacgcctgttcagttgcaggaacagagcattcctttttacgttttatcaacagtctcaaccagatagtaacattaatattcatgttgtctatggttcagagctgtaacattgtgcgccttctaatcaaaggcataagtccatttctgtttttttcatgctggtaagacttccagggagtggttatctcaggccctgcaccagggttaatttggcaattatgcatgctgaacattcttccagcatgtttactgtcacgggcgttaagacctaaaactgtccccgtttcgcctatgcgttctcttccaccatttccgttatgtgcaacaacttgatttatacctaacatttgtgaacatgctaatagtgcttcaagtttaggtctgtaatctgtcgaaacagaaaaataacgattaaaggatcgacaagagatagcccggctagttttaaactttttgccattaattatagcatgatgctttttattgataattgccgctaattcgaccggatcgagagcattggtcatttcatcaatagagactgttatcggtcctataatgtaacgttttcgctgatcatcaaaagttatcccatgatgatttgccattattttgtatttggggtcatagaaacatacaggataatcttttatcccagagtaggtatcctcatcgagtggtttcatacgcgtgaagttctgcatatagttaccattgcaattcgtttcatgatttccagctaatacatgaacattttcattgatactcattatgcgttttaacaaatcgatgataaattgatcaccacagatattgctaaatcgatcgccggtttggtcgcccagaaacgtacatggcgtcacagcgtctttattaataactaaataaggctgaagactttctaaaataatgtctcttctgttcaggatactgattattgtattaacattagtgttaagttgctcattaaagttctcccttagcaatacgttgagaacttcatcttctatattaagcaactggctaaggaaattttctccttcagccatgattcccaaatgtcccgttgcgaaaagcgcgaacaaaactgcaccgactgagccatcggtatcaccaaaataggttggtctggtacttgtgggatcaacgggtaaacaattggagaaatagattctgtcagcgaactggggttttatcattgtttcgaatttaatatcagatacattatattgcgatattttccagttccagatgggtttgtacgactcagtaactgcaacatcattagcattatcatttactgtcatattattaagtaaataaacaatactgcaccaattaatatcggtattatcaagagagcaaccgtaatttttgctattaattgtcacaataaactgataattattattcctacgtagaatatgagcacgcatgcccgatagcatactatatttttctgaatgatccgtttgtatggtaaatgaaattttgtcatcttgaatagattgttggaaccgttctatttgccaatcatctattttttccacaacctcaccgagcattgtcctggcaatacttgatatatcatcacctataccatttgcaatatacccaaacagttctttagtgaagttggtaacatgctcttgcaccatatcatttgttgcgattgtcgttgtactgtcgttagtgcctgccacagttccaattttcatattttacctcatattatttaccgcgaggaatacatagttaacattttatcttatgacatacacctcatgttcgatgggaaaataattatattttgcacaaatcattcagcctcaaagcataatatgaaatttcttatctcatagcagagaaagtccctaaagattgtagaggcgtcatcagaacatgcctctacaatcgattaagaaaacctatgaaatactggcaggattaaaaagacataccaccgtattcatggagttttaatgtagttgaaaacaactaagccctgaggaataaattattttattatttttatcacgtgcttccttcagggaatttagccccataataccattatcaaattgttgattatgatctaccccgggcccatgatgcccatatttttgtctaatgtatttgctggggtcttcacctttgagtgtctccccacatatgaagatacgttcacgtgctggtctgaaatcagtagtgttatcaaaataattagcatatacaggtgtgggtttcaaagtattgcttcggattagatggaatagaggatcatccatgtgttctttatgttttttattaaaaatattggctaattcctcaggatcagtaggatttttcatctgattaaatggaacctgcaaagcaccgagacaataacatttttttcttcatctcttattattccgtgatgactggttaaaacttgcctttctgagtcataattacaaacatcgagcgttttaattaagttatacgtatcaccggcagagagtttatgatttgctagtcgtgcagtatagttaccattaaaattgatttcatgatttccagccagaacgacgacatttttattaatacggctatctttattaccctccatatttcgcatagaatttagcaaagtaaggatatatttatcaccaaaaatagtactaaatctatcgcctgtatgatccccaaggaagatacaaggggttatcgcatcgtcctttaaaaaaacatgttgatgcaactcattcaagatcatgtctctcgtatttaataaatcgtagagcactttattatttttatgtttgtatgcagatgaagccatctcttcgtgttttaataattcacataataaactccaacccttttccctgatgcctatatgccctgaaacgagcaatgcataaagtacagcgcctactcttccatctgtatcgccaaaataagccgtgttggcattttgtgggttaatcacaccacactgtttatagaagtctatttttgaaaacacagatttaacatagctatcaaacttttccttagtaaacgtctctttagagacatcccaacgccagtcaggtttgaaattaccactaagaagagtaaagaaatttctcgctatgatagaaagcccatcaactttataaattatatctgatttatctccagaggaattaataaaataataaccgcccttacactcaacagtaacggtaatgggagacgataattttaacacatggttattgtctggtataattgtaaagataaacgtatcagtagtattgtcggcgaatctattatattcttgaatatctatagaaggttcactattataaaaccatactttctccatctggtgactacgatcatttaccttccagtgaccatgttgcaggaaatagatgatatgcaggccaaaatcgttatctatttgcgaatcattatccagtttatcaaattcaactatctttgcacgatgtgttttatcaaccttgccatggtgttgatgactgttaactttatctgaatgcttatcttgatggcttgaagagatgtttctaatctgattgtcaattgctttcataaataacctgtgatatttttgaattgtttgtaacaaaataaatgatacttgtctgaaaaacagatttacgacgatataaaataataatacttatatgttcgctgattttaagcaccgagactatccggtcttttaccaaataatgaagaataatccctccctggaagataattgtaaaaaacaacagcataagaattaatcttaggataaatttttatttatcatggccttttgaacgctgaaaagtagcgctctgcaaagtaaaccccgctatagttatgctatgcatttgtctttaatgatatctcgtcattatattaacaggatgaaattatcattaatgcatatttcaatattagcagggatacctgaggagtttaaagtgaacatatatatcgggtggcttttcaaattaatccctttgattatgggcttaatttgtatcgcgttaggtggctttgtgctggaaagttcagggcaaagcgagtatttcgtcgcgggtcatgtgctgatttctctggcggccatatgcctggcattattcactaccgcatttattatcatttcgcagctcacgcgcggcgttaatacgttttacaatacattgttccccattattggctatgcggggtcaattatcaccatgatatggggttgggcactgttagcaggcaatgatgtgatggcagacgagtttgtcgccggccatgttattttcggcgttggtatgattgccgcctgtgtatcgacggtggcagcgtcatccggtcactttctgctcattcccaaaaatgcagcggggagcaagagcgacggaacaccggtacaggcttattcttcattaatcggtaactgcctcattgccgttcccgttttactcaccctgctcggtttcatttggtctattacgctgttacgtagtgctgacataactccgcattatgtcgcgggtcacgtattgcttgggttaaccgcaatctgtgcctgtctaattggccttgttgccacaattgtccatcaaacacgtaatacgttttcaactaaagaacactggctgtggtgttattgggttatttttctcggctcaatcacggtactgcaggggatatacgtcttagtcagttccgatgcaagcgcccgactggctcccggcattattcttatttgcctcggaatgatctgttacagcatattctcaaaagtctggctactggcactggtatggagacgtacctgttcgttagccaacagaataccgatgattcccgtcttcacctgcctgttttgccttttcctggcatcgtttcttgcggaaatggcgcagaccgacatgggatattttattccttcgcgagttctggtcggtttgggagcggtatgctttacgttgttctcaatcgtttcaatattagaagcgggttctgctaaaaaataattgcaacgtaccggataaaaccagcgttgaccatttgcgtaacgctggtttttcttaggcatcatgaaataacgcagcattaatgcatagtggttaagtataaaaaacagcaaagttactgtttttttcaacctgttcatatttcataaagatctggccactgagtgagttttcaatcacctttccatccaccttatattaagcatggagggtttcagttcacgggctcattagaaaataatcacaagataaccactatcaaaattagctcatttttaatgcgactctaataattttcatctttaggaaataggtcaggacgactttgctgcaatcaaatcctgcgcacaagcccacgcactcgaccacgcccactggaagttatagccccccagccagccggtgacgtccatcacttcgccgatgaagtacagcccaggcactttgcgcgcttccatcgtccgtgaagagagttcgttggtgtccacgccgccgagcgtcacttcggcagtgcgatagccttcagtgccgttgggttgtacgcgccagtcggtcaatgtgctaatcagtgcctgttggtcacgcacgttgagctgttttagcgaaacatccgggatttgcccgagttgctgtaagcgttcaaccaaccgcttcggtagatgaaccgccagtgtgtttttcaggctttgattcggatgtgcgttacgctgctcattcaggaaggtttcgaggtccacatccggtagcagattgatgctgacaaattcccccggttgccagtagcttgaaatctgcaacaccgccggtccagacaagccgcggtgggtgaagagtaagttctcacggaaaacggtgccgttttcagcggtaatcacggaaggcaccgccacgcccgccagcacctgtaactcttcgagcaacggtttatgcagagtgaatggcaccagacccgcgcgggtcggcagcacgttgaggccaaattgttcggcaatcttataaccaaacggcgacgcgcccagccccggcattgacagcccaccagtcgcgatgaccagcttttcgcaaccgacagtcatgccgttcagatcaagcgtgaagcctgtttcatccttcgccacactcagcacttcgctacgcaatctgaaggtcacattgcccttctcgcactcatccaccagcatgtcgacaatctgctgcgcggagtcatcgcagaagagttgccctaacgttttctcgtgccaggcgatgccgtgtttattgaccagatcaatgaaatcccactgggtaaaacgtgcgagtgcagacttacaaaaatgcggattctggctcagataagcgcctggttcgacataaaggttggtaaagttgcagcgcccaccgccagacataaggattttgcgccctggttttttaccattatcgatcagcagaacccggcgtcctgcctgacctgccagcgcagaacagaacatacccgccgcaccagcgcctataataatggcatcaaacctttccacgttgcgctcctcttagaaaaaacgggcgtgaattgtaaagattcctcagtggtcgcaccagcatcaatattactaaaaggaagtatttgcctgaattatataagataattattttttgagtgaaatccatacagggggcaaatcaaaaaaagtctatatttcactttgcccgcgccgcgaaagtcactgataatgcgccgcgttcatgtcctcaaaatggcgtaacgtcctatgctacatttgtttgctggcctggatttgcataccgggctgttattattgcttgcactggcttttgtgctgttctacgaagccatcaatggtttccatgacacagccaacgccgtggcaaccgttatctatacccgcgcgatgcgttctcagctcgccgtggttatggcggcggtattcaactttttgggtgttttgctgggtggtctgagtgttgcctatgccattgtgcatatgctgccgacggatctgctgcttaatatgggatcgtctcatggccttgccatggtgttctctatgttgctggcggcgattatctggaacctgggtacctggtactttggtttacctgcatccagctctcatacgctgattggcgcgatcatcgggattggtttaaccaatgcgttgatgaccgggacgtcagtggtggatgcactcaatatcccgaaagtattaagtattttcggttctctgatcgtttcccctattgtcggcctggtgtttgctggcggtctgattttcttgctgcgtcgctactggagcggcaccaagaaacgcgcccgtatccacctgaccccagcggagcgtgaaaagaaagacggcaagaaaaagccgccgttctggacgcgtattgcgctgatcctttccgctatcggcgtggcgttttcgcacggcgcgaacgatggtcagaaaggcattggtctggttatgttggtattgattggcgtcgcgccagcaggcttcgtggtgaacatgaatgccactggctacgaaatcacccgtacccgtgatgccatcaacaacgtcgaagcttactttgagcagcatcctgcgctgctcaaacaggctaccggtgctgatcagttagtaccggctccggaagctggcgcaacgcaacctgcggagttccactgccatccgtcgaataccattaacgcgctcaaccgcctgaaaggtatgttgaccaccgatgtggaaagctacgacaagctgtcgcttgatcaacgtagccagatgcgccgcattatgctgtgcgtttctgacactatcgacaaagtggtgaagatgcctggcgtgagtgctgacgatcagcgcctgttgaagaaactgaagtccgacatgcttagcaccatcgagtatgcaccggtgtggatcatcatggcggtcgcgctggcgttaggtatcggtacgatgattggctggcgccgtgtggcaacgactatcggtgagaaaatcggtaagaaaggcatgacctacgctcaggggatgtctgcccagatgacggcggcagtgtctatcggcctggcgagttataccgggatgccggtttccactactcacgtactctcctcttctgtcgcggggacgatggtggtagatggtggcggcttacagcgtaaaaccgtgaccagcattctgatggcctgggtgtttacccttccggctgcggtactgctttccggcgggctgtactggctctccttgcagttcctgtaatcgtacgcaccaaaacgagcgggtcagctggcccgcttcagattgtgacatagtgcgctttgttcatgccggatgcggcgtgaacgccttatccggcctacaaaaacatgcaaattcaatagattgcagagattatgtaggcctgataagcgtagcgcatcaggcaattttgcgtttgtaatcagtctcgagcgggtcagtttactggcccgctttttttatgcgttattattgctgaagtgcttaatgccaaatcatcaatgcaatcaggctgaccaccaccagaccacacaatgcgctggtcagaataaactgccgacgcacccgctcacagcggcgaataaattcatcatcgtgatgatcgcgataacgttgggcatagatataccaaacgagacgcacctgtttgttgggttggccatgtgaggtaaaaaagccccctccatcaacatattgatagagcaatggatcgcagttacgcagtaccactaacaacgcgcgtagtgatgagaaatagcgcgccatgttaacaatgcaaacgacacataaagcccaaaataatgcgacggtgcttatcatacctcctccccggcgacctgcccgcggagttccaccccggggctaccgctcccgatacgctgccaatcagttaacaccaggtcctggagaaaccgcttttgtggtgaccaacatacgagcggctctatagatagtgtaggagatcaggttgttttttttccagaaggttaaccactatcaatatattcatgtcgaaaatttgtttatctaacgagtaagcaaggcggattgacggatcatccgggtcgctataaggtaaggatggtcttaacactgaatctttacggctgggttagccccgcgcacgtagttcgcaggacgcgggtgacgtaacggcacaagaaacgctagctggccagtcatcgacaactttatggaaggagtaacactatggcttataaacacattctcatcgcggtcgacctctccccggaaagcaaagttctggtagagaaagcagtctctatggctcgcccctacaatgcgaaagtttctctgatccacgtagatgtaaactactctgacctatacaccgggcttattgatgtgaatctgggtgatatgcagaaacgcatctctgaagagacacatcatgcactgaccgagctttccactaatgcaggctacccaatcactgaaaccctgagcggcagcggcgacctgggccaggttctggtcgatgcaatcaagaaatacgatatggatttggtggtttgtggtcaccaccaggacttctggagcaaactgatgtcttccgcacgtcagctgatcaacaccgttcacgttgatatgctgattgttccgctgcgcgacgaagaagaataatcttccctctacgacgtgttcctgaacgcccgcatatgcgggcgttttgctttttggcgcgccttgttacctgatcagcgtaaacaccttatctggcctacggtctgcgtacgcaatcaaaatccccagccaatacaacatttaacaccatcatattttccatcattagtgtgatcatctggttattttctgttgtaatagtgtattaatctattcaccgcatcaatattaagaatctctgacagatgtaaactttttcgcgcgttatcccttacgcgttcatacttttcaggatggtattggaaggttaataaatatgaatacaacaacacccatggggatgctgcagcaacctcgcccatttttcatgatcttttttgtcgagttatgggagcgattcggctactacggcgtgcagggcgtactggcggttttcttcgttaaacagcttggattctcgcaagagcaggcttttgtcacttttggtgcttttgctgcgctggtctatggcctcatttccattggcggctatgtcggcgaccacctgctggggaccaaacgcaccattgttcttggagcacttgtgctggcgattggctacttcatgaccggcatgtcgctacttaagcctgacctgattttcatcgccctggggactatcgctgtcggtaacggcctgtttaaagctaacccagccagcttgctttcgaagtgctatccgccgaaagatccgcggcttgatggcgcattcaccctgttctatatgtcgatcaacatcggctcgttgatagcgttatcgctggcccctgtgatcgctgatagattcggttattcagtcacctacaacctgtgcggggcggggttaattatcgcattactggtttacatcgcctgtcgtggaatggtgaaagacattggttctgaacccgacttccggccaatgagcttcagcaaactgttgtacgtgttacttggcagcgtggtgatgatcttcgtatgcgcatggctgatgcacaacgtagaagtcgccaatctggtgctgattgttctctccatcgtcgtcaccatcatcttctttcgtcaggcattcaagctggataaaaccgggcgcaataaaatgtttgtcgcctttgtcctgatgctcgaagcggtggtgttttacattctctacgcccagatgccaacatcgctgaacttctttgccatcaacaacgtgcatcatgaaattctcggtttttccatcaacccggtcagcttccaggcgcttaacccgttctgggtggtactcgccagcccaatactggcaggcatttacacgcatctgggtaacaaaggcaaagacctctcgatgccgatgaaatttactctcggcatgtttatgtgctcactgggctttttgacggcggcagctgcgggaatgtggtttgcggatgcacaagggctgacatcgccatggtttatcgtgctggtgtacttattccagagcttaggtgaactgtttattagcgcccttggcctggcgatgattgctgccctggtgccgcagcatttgatgggctttattctcgggatgtggttcctgacgcaggctgccgcgttcttgctgggcggctatgtggcaacatttaccgcggtgccggacaacattaccgatccgcttgagacgttgcccgtctataccaacgtgtttggtaagattggtctggtcacgctgggcgttgcagtagtgatgctgttgatggtgccgtggctgaaacgcatgattgcgacgccggaaagccattaattattcttgcagaaagcagggtagcgttatcgctaccctgttttagttttacactggcgtacctgcatagatatcaaagcgatgccctttagtgactaccgcgtttggcgtggcgacattcgccagcggtggcgcgtagtccgggcgctttaccaccacgcgtttggtcgccagcaagcgtgcaggctccagtaatccatcggcatcaagatccggtcccaccagcgactgaaagacacgcatctcttttttcactagcgcgcttttctgcttatgcgggaacatcgggtcgagataaaccacctgcgggcgcggggtaatatcagtcagcgccgtcaggctggaggcgtgaattaactgcaaccgctcctgcaaccagccgccgatttccgcatccgcataaccacgcgccaggccgtcgtcgagtagcgcggcaaccactggattacgctccagcatccgcacgcggcagccgactgaagccagtacaaaggcatcgcgcccaagtcctgcagtggcatccaccacatccggcaaataatcgcctttaatgcccaccgctttcgccaccgcctcaccgcgaccaccgccgaatttgcgtcggtgcgccatcgctccgccaacaaaatcaacaaagatgccgccaagttttggctcatcacgcttgcgcaattccagatgttccggcgttaacaccagcgccatcaggttgtcttcatcgtgctccagcccccagcgggccgccagaacagataaggcaccgtctccggtgcctgtttcatcaattaagcagattttcactgaatgatcagcccttaatgccgtaatgctccagcatcgcatccagctgcggttcacgaccacggaagcgtttgaacagatccatcggctcttctgaaccgccacggctcagaatgttgtcgaggaacgactgcccggtttcacggttgaaaatgccctcttcctcaaagcgcgagaaagcatctgccgccagtacgtcagcccacaggtagctgtagtaacctgcggcataaccaccggcgaaaatatggctgaaagcgtgcgggaaacggccccaggacggagatggcaccacggcaaccagtttcttgatttctgccagagtttcgaggatttttgccccctgatccgggcggaactcggcatgaaggcggaaatcaaacaggccgaactccagctgacgcagaataaacagcgccgcctggtagttcttcgccgccagcattttatccagcaactctttcggcagcggttcgccggtttcatagtgaccagagataaacgccagcgcctccggctcccagcaccagttttccataaactgactcggcagttcgaccgcatcccacggcacaccgctgataccggaaacaccagcggtttcgatgcgggtcagcatatggtgcaggccgtgaccgaactcgtggaagagggtgatcacttcgtcgtgagtgaacagcgccggtttaccatttaccgggcggttgaagttacaagtcaaatacgcgaccggtttttgcaaagaaccatcagctttacgcatctggcctacgcagtcatccatccacgccccgccgcgcttgttttcacgggcatacagatcgaggtagaagctaccgcgcagttcgttattttcgtcatacagttcgaagaaacgtacatccggatgccagacatcaacatctttacgctctttagcggtgatgccgtaaatacgcttaaccacttcaaacaggccgttaaccgctttgttttccgggaagtacggacgcagctgttcgtcactgatgctgtagaggtgctgtttttgtttttcgctgtagtaagcgatatcccacggctgcaactcatcgacgccaaattcggctttggcaaaggcacgcaattgcgccagctctttttcgccttgtggacgcgcgcgttttgccagatcggttaagaaatccagcacctgctgcgggttttctgccattttagtggcaagggatttaaaggcgtagttttcaaagcccagcagttgcgccagttcgtgacgcagcgcgaggatctcttccatcaccttgctgttatcccatttaccggcgtttgggccttgatcggaggcgcgggtgctgtaagcgcgatacatctcttcacgcagagcctggttgtcgcagtaggtcattaccggcaagtagcttgggatatccagcgtcagcaaataaccttccagctctttcgcttcggcctgggcttttgccgcagccagcgcgctttctggcatccccgccagctccgcttcgtcggtaacgagtttggtccagcccattgtcgcatcgaggacgttgttgctgtactggttgcccagttcagaaagacgggtcgcaatttcgccgtaacgctgctgtttctctttcggcagacctatgccagagagttcaaagtcgcgcagtgcgttatcaaccgctttcttctgcgccgtgttcagcgtggcgtaatgatcgccatcgcgcaggtcgcgatacgctttatacagcccttcatgttgccctacccaggtgctgtattccgacagcagcggcagggtttgttcgtaggcttcacgcagttccgggctatttttcaccgagttcaggtggctgaccggggagaagatacgccccaacacatcgtccacttccgccagcggctggcagagattttcccaggtgtacggtgccccttgcgctactacgcgctccacgttttcgcggcagtcgttcaatgccttagtcacggctggaacgacatgttccgggagaattttagaaaacggaggcaattcaaagggagtcagtaacggattcgtcattcgcgcagtcctggttaaagaggttaaggaagcgctcaacaggcgctttacataatgtgtgtagcatggggttaagtgtagtgaatttcaatgagaaacgttacgctttcgcggcggcggcctcttttcggtatactgtcctgatacgcttttgtgcgccccgaatacgggccgatttttacttaccggaacacctttacccatgctcagttatcgccacagctttcacgctggcaaccacgccgacgtccttaaacataccgttcagagcctgatcatcgagtcgctgaaagagaaagataaaccgtttctctatctcgacacccacgcaggggccgggcgttatcagttaggcagcgaacatgccgagcgtaccggcgaatatctcgaaggcatcgcccgtatctggcagcaggacgatttgcccgcagaactggaggcgtacatcaatgtggtaaaacacttcaaccgtagcggtcagttgcgttactaccccggttcgccgttgattgctcgcctgctactgcgtgaacaggacagcctgcaactgaccgaactgcacccgagcgattacccgttgttgcgttctgaatttcagaaagatagccgtgcgcgtgtcgaaaaagccgacggtttccagcagcttaaggccaaactgccgccggtttcccgccgtggtttaatccttatcgacccgccgtatgaaatgaaaactgactatcaagcggtggtcagcgggatagcagaaggttacaaacgtttcgccactggtatttacgcactgtggtatccggtggtgctgcgtcagcaaattaagcgcatgatccacgatctggaagcgaccggtattcgcaaaattctgcaaattgaactggcggtactgccagacagcgatcgccgtggcatgaccgcttccggcatgattgtgattaacccgccgtggaaactggaacaacagatgaataacgtgctgccgtggctgcacagcaaactggttccggcaggcaccgggcacgccaccgtaagctggatcgtgccggagtaattgcagccattgctggcacctattacgtctcgcgctacaatcgcggtaatcaacgataaggacactttgtcatgactaaacactatgattacatcgccatcggcggcggcagcggcggtatcgcctccatcaaccgcgcggctatgtacggccagaaatgtgcgctgattgaagccaaagagctgggcggcacctgcgtaaatgttggctgtgtgccgaaaaaagtgatgtggcacgcggcgcaaatccgtgaagcgatccatatgtacggcccggattatggttttgataccactatcaataaattcaactgggaaacgttgatcgccagccgtaccgcctatatcgaccgtattcatacttcctatgaaaacgtgctcggtaaaaataacgttgatgtaatcaaaggctttgcccgcttcgttgatgccaaaacgctggaggtaaacggcgaaaccatcacggccgatcatattctgatcgccacaggcggtcgtccgagccacccggatattccgggcgtggaatacggtattgattctgatggcttcttcgcccttcctgctttgccagagcgcgtggcggttgttggcgcgggttacatcgccgttgagctggcgggcgtgattaacggcctcggcgcgaaaacgcatctgtttgtgcgtaaacatgcgccgctgcgcagcttcgacccgatgatttccgaaacgctggtcgaagtgatgaacgccgaaggcccgcagctgcacaccaacgccatcccgaaagcggtagtgaaaaataccgatggtagcctgacgctggagctggaagatggtcgcagtgaaacggtggattgcctgatttgggcgattggtcgcgagcctgccaatgacaacatcaacctggaagccgctggcgttaaaactaacgaaaaaggctatatcgtcgtcgataaatatcaaaacaccaatattgaaggtatttacgcggtgggcgataacacgggtgcagtggagctgacaccggtggcagttgcagcgggtcgccgtctctctgaacgcctgtttaataacaagccggatgagcatctggattacagcaacattccgaccgtggtcttcagccatccgccgattggtactgttggtttaacggaaccgcaggcgcgcgagcagtatggcgacgatcaggtgaaagtgtataaatcctctttcaccgcgatgtataccgccgtcaccactcaccgccagccgtgccgcatgaagctggtgtgcgttggatcggaagagaagattgtcggtattcacggcattggctttggtatggacgaaatgttgcagggcttcgcggtggcgctgaagatgggggcaaccaaaaaagacttcgacaataccgtcgccattcacccaacggcggcagaagagttcgtgacaatgcgttaaatgttaaagggctaagagtagtgtgctcttagcccttaattacgtttccgctatcagttcagaagctgaagcagaaagcggatcagttccagcagcgcaattaacgcccctagaacgatgattgctttatcaatcacccgttttctccatgcgatggagtgagaatgcatccgcttactcatccactgcctgtcacggcgcatgtctcattgttagataagaactctctcactccggccagagcatcagttaacggcaccacccgtacttctgaccaggactttgaaagcgtttatgcgcattgccagagtgaaaatgcctcagagctaactggataatcatacagtacatgcaggttataaaaccagcacgtccttgcaatagtttcagtatggtattagcattgatgcgttagatgatggctatctcactccagtcagagccaccaactcagggctggaaagtaaaaaaccgacgcaaagtcggtttttttacatccggattcggacaaggcttaatatgacgatgacccagtgaaagtatataaatcgtcactgcgatatataccgaagtgctccctccgccagctgaagaaatcgctaattcttgcaatgttagccactggctaatagtattgagctgttagataagaactctctcactccagccagagccaccaactcagggctggaaagtaaaaaaccgacgcaaagtcggtttttttacgtcctgattcagacctcctttcaaatgaatagccaactcaaaattcacacctattaccttcctctgcacttacacattcgttaagtcatatatgtttttgacttatccgcttcgaagagagacactacctgcaacaatcaggagcgcaatatgtcatttctgttacccatccaattgttcaaaattcttgctgatgaaacccgtctgggcatcgttttactgctcagcgaactgggagagttatgcgtctgcgatctctgcactgctctcgaccagtcgcagcccaagatctcccgccacctggcattgctgcgtgaaagcgggctattgctggaccgcaagcaaggtaagtgggttcattaccgcttatcaccgcatattccagcatgggcggcgaaaattattgatgaggcctggcgatgtgaacaggaaaaggttcaggcgattgtccgcaacctggctcgacaaaactgttccggggacagtaagaacatttgcagttaaaaatttagctaaacacatatgaattttcagatgtgttttatccgggaggcattatgttactggcaggcgctatctttgtcctgaccatcgtattggttatctggcagccgaaaggtttaggcatcggctggagtgcaacgctcggcgcagtactggcgttagttacgggcgtggtccatccgggtgatattccggtggtgtggaatatcgtctggaacgcgacggctgcgtttatcgccgtcattatcatcagcctgctgctggatgagtccggcttttttgaatgggcggcgctgcacgtctcacgctggggtaatggtcgtggtcgcttgctgtttacctggattgtcctgctcggtgctgccgttgccgccctgtttgccaatgatggcgcggcgcttattttgacaccgattgtcatcgccatgctgctggctttagggttcagtaaaggcactacgctggcgttcgtgatggcggccggattcattgccgataccgccagcctgccgcttattgtctccaacctggtgaatatcgtttccgctgatttctttggcctcggctttcgcgaatacgcctcggtgatggtgccggtggatatcgccgcgattgttgccacgctggtgatgttacatctctattttcgcaaagatattccgcagaactacgatatggcgctgctgaaatctcccgcagaagcgatcaaagatcctgctacgttcaaaactggctgggttgttttactgcttctgctggtgggatttttcgtcctggaaccgctcggcattccggtgagcgccattgcagctgtgggcgcgctgatattatttgtcgtcgctaaacgcggtcatgcgattaatacgggtaaagtcctgcgcggtgccccctggcagattgtcatcttctcgctcggcatgtatctggtggtttatggcctgcgcaatgccggattaacggaatatctttctggcgtactcaacgtgctggcggataacggcctgtgggccgcgacgctcggcaccggattcctcaccgccttcctctcttctattatgaacaatatgccgacggtactggttggcgcgttgtccattgatggcagcacggcatctggcgttatcaaagaagcgatggtttatgccaatgtgattggctgcgatttgggaccgaaaattaccccaattggtagcctggctacgctactctggctgcacgtactttcgcagaagaatatgactatcagctggggatattacttccgtacagggattatcatgaccctgcctgtgctgtttgtgacgctggctgcgctggcgctacgtctctctttcactttgtaatgagatactgatatgagcaacattaccatttatcacaacccggcctgcggcacgtcgcgtaatacgctggagatgatccgcaacagcggcacagaaccgactattatccattatctggaaactccgccaacgcgcgatgaactggtcaaactcattgccgatatggggatttccgtacgcgcgctgctgcgtaaaaacgtcgaaccgtatgaggagctgggccttgcggaagataaatttactgacgatcggttaatcgactttatgcttcagcacccgattctgattaatcgcccgattgtggtgacgccgctgggaactcgcctgtgccgcccttcagaagtggtgctggaaattctgccagatgcgcaaaaaggcgcattctccaaggaagatggcgagaaagtggttgatgaagcgggtaagcgcctgaaataaagcggcgatatcccccccacaggttgttagaaaagtgcgctttatttatgtcggatgcgacgctggcgcgtcttatccgacctacaaagttatgaaaattcgatgaatagtatgttatttgtaggcctgacaggcgtagcgcatcaggcgattttgctatttacacagtactccctgcgtgagattccaattatcgcgtccagcatggtgtatcagtgagctgcttagttatcagcgatacagcgcagtagtttaaagacgtactggattatgatttatcagtggtttacacaacaaattattaaataattataagataccttaacccattttattattacacatctaaaacatcacaaaaaaaatcacttcacacactatcagagaacataataactttttaaaatgagcgcattttgatagttgttaacgatttcctttacgatactatcactaccctttttttacacacaaatattaccgggtggagataaaagggaaatcaaaggtaattatatcaggaagatataacgcattacatttattgtgtgtagaagaaaatccattcctgttctaattatccaatttaaacatcttagcataaaacaaatgatgaataaggaattttatgtcaattgactttaccccaggtataataaatacatatcacggcgatatttataactgcacaacaaataccgataatgctaaaacgccagacacaccgaagtggccttgcgataattgggaagaacaacaacccattaattccacattctctggagaaggatatatctctgatcaatatgatttagcgcaacaccaacttcaacaaattaatgcgtgccacacgaacactacatatacaaatgcagactactcaaaagttgtggctcaacttgtaagtcttattactaacattgaaacgataagttcgacacaacttacgcaacagacacaatcaatacttaatcagattaataacattagatatgaaaaaaacaaaagtgctgaatgtcgaatcattgttatcgctaatcctaaacccgacaaggcaatcataactaaaattagcgtagaagagggaatacccataacattcagtgtccaaaccatgttttcagatactaattttattgctgaacaacgagctgacttaccaactaatataaaagatattcaaagcctgtatcaaaaaatgacgaagttatatattgagcacagtgaaaataaaaacaggatgaaagtctttgccggaaccaactttattgatttcaatatgacaggacagaacctgtccgggttcgttctaaccttgtcaaggttttatttcgaagatctacttaatataaatttcactgacgcaaatttagggaaggtgcgaataagcggggaaattcttctcggctgactcagtcatttcatttcttcatgtttgagccgattttttctcccgtaaatgccttgaatcagcctatttagaccgtttcttcgccatttaaggcgttatccccagtttttagtgagatctctcccactgacgtatcatttggtccgcccgaaacaggttggccagcgtgaataacatcgccagttggttatcgtttttcagcaaccccttgtatctggctttcacgaagccgaactgtcgcttgatgatgcgaaatgggtgctccaccctggcccggatgctggctttcatgtattcgatgttgatggccgttttgttcttgcgtggatgctgtttcaaggttcttaccttgccggggcgctcggcgatcagccagtccacatccacctcggccagctcctcgcgctgtggcgccccttggtagccggcatcggctgagacaaattgctcctctccatgcagcagattacccagctgattgaggtcatgctcgttggccgcggtggtgaccaggctgtgggtcaggccactcttggcatcgacaccaatgtgggccttcatgccaaagtgccactgattgcctttcttggtctgatgcatctccggatcgcgttgctgctctttgttcttggtcgagctgggtgcctcaatgatggtggcatcgaccaaggtgccttgagtcatcatgacgcctgcttcggccagccagcgattgatggtcttgaacaattggcgggccagttgatgctgctccagcaggtggcggaaattcatgatggtggtgcggtccggcaaggcgctatccagggataaccgggcaaacagacgcatggaggcgatttcgtacagagcatcttccatcgcgccatcgctcaggttgtaccaatgctgcatgcagtgaatgcgtagcatggtttccagcggataaggtcgccggccattaccagccttggggtaaaacggctcgatgacttccaccatgttttgccatggcagaatctgctccatgcgggacaagaaaatctcttttctggtctgacggcgcttactgctgaattcactgtcggcgaaggtaagttgatgactcatgatgaaccctgttctatggctccagatgacaaacatgatctcatatcagggacttgttcgcaccttccttaggtgacactatttttttacataaagaacaccctacccccaaattatataaagatggacaatatcttgacaaacaaatcgaaggtttattttcaacattattaaccattaatgacaaccttttacgagcaaaagcggaaattgcttcgacaataattaaatttttagaggccaggataaccaatctttcatacaatgacatattaaaatatcagcaagaattccaaagacaatgttataagcaagttaaagcctttacgacactctcccgatacaataaaattcaaacatgggcagaaatgtctgaatatcaattcgaagtatttcaatacgagacgcttaacccaaaaaaaatgtcacacacgccttatttaaagaggccactgcctaatgaaaaagatataaattatggggtggaaatagaaataccatctggtaaaagaattcgcttatcaaatcattaccagaatataataccataatattgattattagcactttataatcattgaataaaaatagattttatgtacttttaaaacaatgcactatattatggggtgatggatattcatgtcacgccccaaaattaactgagttcacctaaacagaaaggatataaacatcagacaggtttacgttactatcaggcatatcacctcagaatcagatgaaaactataaagaaatatctattatggttttaatatttgttgataaggatagtaacatgaacatgacaaaaggtgcactcatcctcagcctttcatttttgcttgccgcatgtagttcaattccgcaaaatatcaaaggcaataaccaacctgatattcaaaaaagttttgttgctgttcataaccagccggggttatatgttggtcaacaagcgcgctttggtgggaaggttatcaacgttatcaatggcaaaacggatacgttgttagaaatctctgtattaccgttggatagctatgcgaagcctgatattgaagccaactatcagggccgactgctcgccagacaaagcggcttccttgatccagtgaactatcgtaatcactttgttaccatcctcggcaccattcagggtgaacaacctggctttatcaataaagtcccgtataacttcctggaagtgaatatgcagggcatccaggtgtggcatttgagagaagtggttaataccacctataacctgtgggattacggctatggtgcattctggccggaaccgggctggggtgcgccttactacaccaatgcggtgagtcaggtaacacctgagctggtcaaataacaccaccgaaagatgcagatgctttctcagcatctgcatcatgcattacatcaaattaatacacagtaagctaactattattattataagccctgtcctgttaattacctttggcaaactgattataaagttaatgtccgcaccaggagtcggttatgtttcttataattaccagggatacgatgttcttcaccgcgatgaaaaacattctgagtaaaggtaatgtcgttcatatacagaacgaagaagagatcgacgtaatgttgcatcagaatgccttcgtcattattgatacattaatgaataatgtatttcattctaattttctcactcaaattgaacgattaaaacctgtccatgtcattattttctccccctttaatattaaacgctgcctggggaaagtgccggtgacctttgttccgcggactatcactatcattgattttgtcgcactcatcaatggcagttactgctctgtgcctgaagcggctgtgtcactttcgcgcaagcaacatcaggttctgagctgcattgcgaatcaaatgacaacggaagatattctggagaaactgaaaatatcgctaaaaacgttctactgccataaacacaatatcatgatgatcctcaatcttaagcggatcaatgagctggtacgccatcagcatattgattatctggtgtgaatttcaggcttacggtgagtctggctacgctgccacacagattagctaattgaaacgcctttcacccctgccataccttttaataatcgcaacaggtcttctatcgacgttgtggcatgaagctggatatcaatggcgaccacttcatgatcttcattttcctgcaacgaaactaaatcagtttttattttttgctgcttaaaccagtcgagcattgataccgtattaccgttcactaatgtcagctgtaaatggtaatttttgttcatcaggcggaaggttaattgatggaagacttccagcaccaacaaggtcatcactgaaccataaatacccagttcgtacataccgctgccaataaccatacctatggcggcggtcacccagatatccgctgccgtcgtcagacctacaatattttggttacgaacgagaatgttacctgcaccgataaacccgacgcccgtcaccacctgagcagcaatacggctggggtcgagtccgacgtgatctaaagacagcacgtcagcaaaaccatatttcgaaacaatcataaacagggcgcttcccatgccaattaatacatgtgtgcgtaaccctgctcctttgccgcgcatttgcctttccatgccaatagcgccacaggcaattgccgcgagtataagacgtataataaattctgctgtcatataaaaatgcaaaaaggagcagcaagatggctcaacttgctactcctttttacttgcacctcattaattcggcaagtcattagatgcttgatttttgaaggtatacaaatttttctgcgggtttttcttacagtattcgatcactttaggaatttgagtgagatcggtttcatttaaagtaacggtatcgccacctttatatactgtttcttcatgcagcatccaccatgcaaccggggtcattgcttttggattcagatcaataaattcctggcaggtcatatctttagcggattcattggctgccaacgcagattgtgcgttcaccagtgacaaagccgctacagcgcccataaaaataaacgctttacggagagatgaaatattcattttgtaacccattcaatatagagattatatatgaacaggaggaatagctgcttttaaagaagatattccggcctgttcaatatgcaaggaagtacgatgtaacgcattcccggaattacatatctttcttaattttgtcccattcgcctttaactttatctttaaagttggcttgtttatcctgagtacaagcctgaacgatagctggggttacggttgcaataccctgaacatctaaaaccgcatcttctggtttatctttgttgttcagcgcttcagcaaaaccaactgcagttggctggaaggattcgtccacagccaggaaatcttcacaggtccaggagttgaccggttttttgttatcagctgctttttgcgcatccgctgcattgctcacaactggcagaagaagcagaccaccaagaataacgcctaatacttttttcatcgtaatatcctcaactataaagtgaaagagccgtcacgaatcaatttcgacactgaggttataacctggttttctgtatatgtcatgttgatggaaaatatcaaaatcagatatttttatttcaatacaatgagttacagatgcatcagatactgcaattaggaaatttttattaaatcgactgcattcttagacgcgtttttggcatagattgatagcaggggattttcttcttaattttatagggtggttctatgttatatatagataaggcaacaattttgaagtttgatctggagatgcttaaaaaacatcgcagagcaatccagtttattgccgtgctgctgtttatcgtcgggttgctgtgtatcagtttcccgttcgtctctggcgatattttaagcacagtagtgggtgcattattaatctgctcgggtattgcgcttattgtcgggttattcagcaaccgcagtcataatttctggccggtattatccggtttcctcgtcgcagtcgcctatttattgatcggctatttcttcatccgcgcaccggagctgggcatttttgccattgcggcatttattgccggtttgttctgtgttgcaggggttattcgcctgatgagttggtatcgtcagcgttcaatgaaaggcagctggctacagctcgttattggtgtgctggatatcgtcattgcctggatattccttggtgcaacgccgatggtgtctgtaacgctggtttccacactggtgggaattgaactgatatttagcgccgccagcctgttcagcttcgccagtttgttcgttaagcagcaataattaccccggttgtcacccggatcatagtcacttgatgtgactatgatccgattaatactctctccgctacgcagtgttgtagatcaattgcgcactatcattgaaataattacctgctagtgattatttcaacctactgaatttcatctaatttttttcactctatggcaaattagccatttcaaacattatcatggctgatattttccgtagtcaggtttaatgttttaaaagtgctgtgggaaagtgaacaaagagttccgtaagcgttgatgctatgggcggttaaataagtaatccgggttcatttttttgcaactggcgttgattacattgcataaatatccgtgtctccagacgctatataaaaacctgaagacatgaatgcgttatttactcaggtaatttcaatgcgttaaaagaaagctggcaatccaattgccagcttaagtcgaaacaaggagactcgatatttaaatcggattacattttaactttagtaatattcttcagagatcacaaactggttattgataacttattcttgggcagtaatccgcaaacgttaactttttgtttgctatttacaagctgataacaaccaggaatcttacttaggatcaatatatggagtgcgtgatggataaatctgaagtattgattagtgttaatagacgtattagttcacgaagggtaaagttcttataggcgtttactatattgaacaacgattcggacaaggatgtaaataatgaaaaggatgacatattcgaaacgataacggctaaggagcaagttatgatttttctcatgacgaaagattcttttcttttacagggcttttggcagttgaaagataatcacgaaatgataaaaatcaattccctgtcagagatcaaaaaagtaggcaataaacccttcaaggttatcattgatacctatcacaatcatatccttgatgaagaagcgattaaatttctggagaaattagatgccgagagaattattgttttggcaccttatcacatcagtaaactaaaagctaaagcgcctatttattttgttagccgcaaagaaagtatcaaaaatcttcttgagattacttatggtaaacacttgccccataagaattcacaattatgtttttcacataatcagttcaaaattatgcaactgattctgaaaaataaaaatgaaagcaatatcacgtcgacgctcaatatttcgcaacaaacattaaagattcagaaattcaacattatgtacaagctgaaactaagacgtatgagcgacatcgtcaccctgggtatcacatcttatttttagtcaggacataagcaactgaaattgatggctggcatgacgagggatgcagatgctgatttcattacccccggtgattactaaaggagaggctaaaacgactttattcccctggtatgtgtatccaccagtagaacccttcgttgcccgaatgctggcaggaactgttggcagaacggcaacattttttttgtcgttgacctcaccatgtcgatcactgtgcctgtatcccaccttactggctgacaaccccactatgccgctggtctgtaaatccctcatatctctcctcgcgcgcaatttaaagaaccgttatttctcaagaattttcagggactaaaatgaacagaagaagaaagctgttaataccgttgttattctgcggcgcgatgctcaccgcctgcgatgacaaatcggcggaaaacgccgccgccatgacgcctgaggtcggtgtcgtcacactctcccccggttcggtcaatgtgttgagcgaattgcccggtagaaccgttccttatgaagttgccgagatacgtccccaggtgggcggtattatcattaaacgcaactttatcgaaggcgataaagtgaaccagggcgattcgctgtatcagattgatcctgcacctttacaggccgagctaaactccgccaaaggctcgctggcgaaagcgctctctaccgccagcaatgcccgcatcacctttaaccgccaggcatcgttgctgaagaccaactacgttagccgtcaggattacgacaccgcgcgcacccagttgaatgaagcagaagccaatgtcaccgtcgccaaagcggctgttgaacaggcgacgatcaatctgcaatacgcgaatgtcacctcgccgattacgggcgtcagcgggaaatcgtcggtgaccgtcggcgcactcgttaccgctaatcaggcagattcgctggttaccgtacaacgtctggacccgatttatgtcgatctcacgcagtcggtgcaagatttcttacgcatgaaagaagaggtcgccagtgggcaaatcaaacaggttcagggcagtacgccagtacagctcaatctggaaaatggtaaacgctacagccagaccggcacgctgaaattctccgacccgacagtggatgaaaccacgggctccgtgacgttacgggcgattttccccaacccaaatggtgacttgctgcctggcatgtacgtcacggcattagtggatgaaggtagccgccagaatgtattactggtgccgcaggaaggcgtcacccacaacgcccagggtaaagcaacggcgctcattctggataaagacgatgtcgtgcagctacgcgaaattgaagccagcaaagccatcggcgaccagtgggtcgtcacctctggcttgcaggctggcgatcgggtgatcgtttccggtttgcaacgcattcgtccgggtatcaaagcacgagcaatttcctccagccaggaaaacgccagcaccgaatcgaaacaataacgttgcaggcttaaggggactttcatggctaactattttattgatcgcccggtttttgcctgggtacttgccattattatgatgcttgcaggtggtctggcgatcatgaacttaccggttgcgcagtatccgcagattgcgccaccgaccattaccgtcagcgctacctatccaggtgccgatgcgcaaacggtagaagactcggtcactcaggtgattgagcaaaatatgaatgggcttgatggcctgatgtacatgtcttcaaccagtgatgcggcgggcaatgcctctatcactctgaccttcgagactgggacatctcctgatatcgcacaggttcaagtgcaaaataaactgcaactcgctatgccttcattacctgaagcagtgcagcagcaggggattagcgtcgataagtcgagcagtaatatcctgatggtagcggcgtttatttctgataacggcagcctcaaccagtacgatatcgcggactatgtagcgtctaatatcaaagacccgctaagccgtaccgcgggcgttggtagcgtacaactctttggttccgagtatgccatgcgtatctggctggacccgcaaaaactcaataaatataacctggtaccttccgatgttatttcccagattaaggtgcaaaacaaccagatttccggtggtcaactgggtggcatgccacaggcggcagaccagcagctaaacgcctcgatcattgtgcagacgcgtctgcaaacgccggaagaatttggcaaaatcctgttgaaagttcagcaagatggttcgcaagtgctgctgcgtgatgtcgctcgcgtcgaacttggggcggaagattattccaccgtggcacgctataacggcaaacctgctgccgggatcgccatcaaactggctgccggagcaaacgccctggatacctcgcgggcagtcaaagaggaactgaaccgcttatcagcctatttcccggcaagtctgaagacggtttatccttacgacaccacgccgtttatcgaaatttctattcaggaagttttcaaaacactggttgaggctatcatcctagtcttcctggtcatgtatctgtttttgcagaatttccgtgccacaatcatcccgacgattgccgtaccggtggttattctcgggacgtttgcgatcttgtcggcggtcggtttcaccatcaacacgttgactatgttcgggatggtgctggcgatagggttactggtggatgacgccatcgtggtggtggagaacgtcgagcgtgtcattgcggaagataagctaccgccgaaggaagcgacgcataaatcgatggggcagatccaacgtgcgctggtcggtattgccgttgttctttccgcagtgtttatgccgatggcctttatgagcggtgcaaccggggagatctaccgccagttctccatcacgctgatctcctccatgctgctttcagtatttgtggcaatgagcctgacccctgccctgtgcgccaccattctgaaagccgcgccggaaggcggtcacaaacctaacgccctgttcgcacgcttcaacacgctgtttgaaaaatcaactcaacactataccgatagcacccgctcgctgttgcgttgtaccggtcgctacatggtggtctacctgctgatttgcgccgggatggcggtgctgttcctgcgcacgccgacctctttcttaccagaagaggatcagggggtatttatgaccaccgcgcagttaccttccggtgccaccatggttaacaccacgaaagtgctgcaacaggtgacggattattatctgactaaagagaaagataatgtccagtcggtgtttaccgttggcggctttggcttcagcggtcaggggcaaaacaacggcctggcgtttatcagtctcaagccgtggtctgaacgtgtcggtgaggaaaactcggttaccgcgatcattcagcgggcaatgattgcgttaagcagtatcaataaagccgtcgtcttcccgttcaacttacccgcggtggctgaactgggtaccgcgtcaggttttgatatggaactgctggacaacggtaacctggggcacgaaaaactaacccaggcgcgaaacgagctgttatcactggcagcgcaatcaccgaatcaggtcaccggggtacgcccgaacggcctggaagatacgccgatgttcaaagtgaacgtcaacgctgcgaaagctgaagcgatgggcgtggcgctgtctgatatcaaccagacaatttccaccgccttcggcagcagctacgtgaacgacttcctcaaccaggggcgggtgaaaaaagtgtatgtccaggcaggcacgccgttccgtatgttgccggataacatcaaccaatggtatgtacgcaacgcctctggcacgatggcaccgctttctgcctactcgtctaccgaatggacctatggttcaccgcgactggaacgctacaacggcatcccgtcaatggagattttaggtgaagcggcggccgggaaaagtaccggtgacgccatgaaatttatggcagacctggtcgctaaacttccggcaggcgtcggctactcatggaccggactatcgtatcaggaagcgttatcctcaaatcaggctcctgcgctgtatgcgatttcactggtcgtggtgttcctcgccctcgccgcactctatgagagctggtcaattccgttctcggtgatgttggttgttccgttaggcgtcgttggcgcattactggccaccgatctgcgcggcttaagtaatgacgtctacttccaggttggtttgctgaccaccatcgggctttccgccaaaaacgccatcctgattgtcgaatttgccgttgagatgatgcagaaagaagggaaaacgccgatagaggcaatcatcgaagcggcgcggatgcgtttacgcccaatcctgatgacctctctggcctttattctcggcgtgctgccgctggttatcagtcatggtgccggttctggcgcgcaaaacgcggtaggtaccggcgtgatgggcgggatgtttgccgcaacagtgctggcaatttacttcgttccggtctttttcgttgtagtggaacatctctttgcccgctttaaaaaagcgtaacgtgtaaatgagagtaaggttgaacatgaaggttcagccttactctttcctgctaaccattcaccactcaacaaccagctaaccgtcaggaataccaggcttagtacacagcactgaaagtagaaaccactccagccattcgtcatcaatttgaacaacacaatactgacccacattcccgtaatcgtatgaattgtcagcttaataatcccaaacatgccgagtcttttcctcctgaaaataccgataccgcctggcaaactgcgaaagagaactagccggtagcccggcagaaatcatcagggaagagtttcacatgaagcaggtgtgagatcctgaccaatattcaaatgcgaaatatgtcaggaaaaggtacctggcgaatgttgcgcaaactgatgtggcgttacaccataatattgtcgaaatgtgtttataaagtacgatgtactgctatagccacatttttccgcaatagtatgcagaggaatttgacgtaactcgagtaatcgtctggccatcgacatcctggaggcgagtaatattttactgaaacaggtattttcatcctgcaacttttttttgattagactctcgctggtatacattctttccgcgatatcgcgcagataccaacgtttggcgatatcaaagctaataaggcgttcaacttttcctgaaacagtgctgatgctattgaaaagtaaggggatcagttctttcttatgagaaaacatcgataaacaggaaaggtagagcatattgctcagtatcggtgaatttaccccggattcattgaagctatcaaaaatcgccgtcaccagcggcatggggggtgactggttaattaacaaacggtctttgctgtgtaaccctaaattgcgtggtagctgacgaatattttgtaagtaatggcaaactgtcagctcatcgatatccagtcgtcgcgtatccggtgaacaaaacgcaaaatcgtctgccaaatttttctccagcagcagaatactctcgttatgcagcgatattttttgctgttcatgataaatatcgaatgaacgacgaatgaggatcaccgagcagacatgagtcatgattatcccttatatttcatactgcgattatttcaatttcagtatactaatgaaatgatgccagactgtttcttagcgcaaaaactgccagatttggtaggaccaaaatttatccacaaagtagttttgcataacagttaattgataataagtaaatgcagcacgaatatattttcgcacagcgtatagcttatgtttataaaaaaatggctgatcttatttccagtaaaagttatatttaacttactgagagcacaaagtttcccgtgccaacagggagtgttataacggtttattagtctggagacggcagactatcctcttcccggtcccctatgccgggttttttttatgtctgagtaaaactctataatcttattccttccgcagaacggtcagtgccgtaaaaattcccttgcgcaacaatacttgccgccgagtcacggttcgacaatctctgcgccgatcgctcctgatactctgtgggcgtcatcccataataatttcgaaagacgtaaatgaaatacgacacgctgtgatatccacaggatactgcaactcgcttaattgaaaaaccatgtataacaataagttgcaaagcacgttgcattctacactcagtaagcaactgtgaatatgatgtctcttcttcgcgcaattttttctttaacagacttggactcatcaacagctcgctggcgattcgggctagtgtccactcatgggcgatattattattgataaccgtacaaactcgtgttcgcatgttcggttgtaaaacgttcagaagcagcggtataaagtgctcatcctcaagaaaaacagataacaacgcaaagattaatgctcttttacgtagcatttctgcatagcgaagattcttattctgcgatagttgcgcaacttcctgaaaaacaggaatatctctactacagtgatgaacgagtaatgaagaaacttttttatgtgcatgaagatttaatgcctcctccttgagcatcgggagaaataatgaaagcgtgtcccttgacacgaatacaaaattttcaacacacttatctactcgaatttggcttgcatccgcaaaaaccaggtcaccgccattaaaatagcgatattcaccattaaccatggtgagaatatatttatgtcttgcatacgcaattagacaattcccatgtagtgattgcatagttgacttaatattacataaacatattactgtttattaatgtagcacgccgccctcttaagtcaaattgattgataaataaatttaaacgaagcgggagaacaggatgataatgtgtgatgttctacgggcaggatgactggatttataatacaaaaacgtgtttaagaacacagggaaattaatagtaagcaaataatcccttttcgtgacattaaaggtaatcgctacatttaataaacattcatataacatatatcttatcaacacgatgaatagacagccaatatattattgcgattaataagcaaccgaatgcccagctgtttttttaaaggctgggcattcggtttttacaacgttatgttatcaggtgtgtttaaagctgttctgctgggcaataccctgcagtttcgggtgatcgctgagatatttcagggaggctttgtagtcttccagcaacagttcagcaaagtccatttcgaagccgcgacgacacataatgcgcatcaccacgatgtcggtggcttcaccgccgagagtgaaggccggaacctgccagccgcgcagacgcagacgttcagagaggtcgtacagggtgtatcccggatcttcaccatctttcagtttgaagcaaaccgccgggatgccttcgtccgggcgacccgtacagatgaactcatacggccccagtttggcgatttcatccgccagataagcggcaacctggtaagaggcgttctgtactttggtatagccttcacgaccgaggcgcaggaattcatagtactgtgcaattacctgacccgccgggcgggagaagttgatggcaaaagtaccaatttgaccacccaggtagtcaacgttgaacaccagttcctgcggcagcgcttcttcgtcacgccagataacccagccgcagcccagcggagccagaccgaatttatggcctgaagcactgatcgatttcacacgcggcaggcggaagtcccagacgatatccggggcgacgaacggtgccaggaagccaccgctggcagcgtcgatgtgcatgtcgatgtcgataccggtgtcggcctggaatttatccagcgcatcgtgcagcggttgtgggaactcatagttaccggtgtaggtcacgccgaaagtcggcaccacgccgatggtgttttcgtcacaggcttcaatcatgcgtttcgggtccataaacaactgaccggggcgcatagggatctcacgcagctccacatcccagtagcgggcgaatttatgccagcagatttgtaccggaccgcacaccaggtttggtttatccgttggtttgcctgcagcttccatacgcttgcgccaacgccatttcatcgccatcccgccgagcatacaggcctcggaagaaccaatggtgttggtgccaacggcctgaccatttttcggcgcaggcgcatgccacagatcggcaaccatatttacgcaacgcaggtcgatggctgcggattgcggatattcttctttgtcgatccagtttttattgatcgacaaatccatcaatttatggacgttttcgtcgtcccaggtctggcagaaagtggccaggttctgacgagcgttgccatcaagatataattcatcattgataatctgaaatgcgacatcatcgcgcatttcgtgcagcggaaatcgttttgactccgcgatagtagaaatggcctttgcgccaaaacgtgaatcgagtagttctgagcggaaatccgttaacagcttctggtccatttcgaactccttaaatttatttgaaggcaataaaaaagtaggatttatccgcaatggaagcaaggcattacaggcttaatttaaataacaaaatcctaagcagaaaaacgactttttataatataaacatttaacatgataatattaaaaacagactttattatcgtaataaaaatcgcccaaacattgctgttcgggcgatcaaattaattattgtttatcctgcatatacggcgtgtacaccccgttcagactgtgcaggaaagctacgatatcatccacatcctcctgcggcagctctttgcctacctgatagcgcagcatcagtttcaccgccccgtccagcgtcggcacgtcaccgcgatggaagtacggtgccgttaaagcaacgttacgtaaaccgggtactttctgacgcaatttatcacgctcttctttagtcacattcatacgaccaatatccgccgccgtaatttccccaaagttaaagtcttttttcagccccaacggttcaaaggaacgtccgccgagaataataccaccatgacaagttgcacatttattatctttaaataattgatagccttttttctgttgcgccgtcagcgcattttcatctccgcgcaaccatttatcaaatggggaatccggcgtaattaatgttttctcaaattcagcaatggcatcagtaatattttcgccactgaaaccttgcggatagacttcgaggaactgcgttttaagctgcggatctttttccagcttagcaataatttcgtcccaggatttcgacgccatttcaatcgggttcaacggcggtccaccagcctgatcctgcaatgttgccgcacgaccatcccagaactgctcaacgttaaatactgagttaaataccgtcggcgcgttaatcggcccaactgcgccaccaacaccaatcgatgtttttctgccatcgacgccccccgcattcaacgcatggcaatgagcgcatgaaatggtgctatcagccgataaacggggatcgtgatacagcgcaaaacccaacgccactttttgcgcatcggtaggcagtttttgcgggatgggctgcaccggttcattgcgatgttccggagcagtatcattgctggcgtaatattccgcgcgctgttttgcaatccaggccagtatttccgcccgctcttcatcactcaccttacccgcccagtgtagcgcggtataacgcgttggtggcatagtttcatactgcatcacccattcaatcttattcaaatcgctttgcgaaacgggtttatcagccagcagtgccgcacgcacggcctcaaggttaaaagatttatatccaagcttaatgtcgtaatccatcaactgtttcgcgccaggaatataataataggcgggtaattctgccgaaggcgtgtggcaatagtcgcatcctttttcgcggagaaagcctaaaaccttattattttcactgacagcagatgcctgaacatcggcctgtttactgcgtttattatcgtggtaccacacataaccagataaccctaaatagcaaatcgcgacgccagccaggccgatcgcggtaatacgtgagaccattttcattattcttccctcacggtggtgagttattgtgacccagaaaattttccagaatgctgcaaacgtctctgcgagacaaagccatcataaaaaacagggagatacgctttttgataggaatcaatcaattacatgaatataaactatcaataagatagcctgtgcctattacccagatcaggaatggcatatcatgattgcggcgagagcaggattgaatgttctgaaaatgaaaaacaacaccaaatcggtatttttataaattccattgatattagtgcgttatattttttgacaggttaataaacgtgatccaccgcacgctttgtcgcccaccaggcggagcgaatgactacccttaaagaaaagccgataattagcgacgaatttcggaggttggatccttatgctcaatcagaaaattcaaaaccctaatccagacgaactgatgatcgaagtcgatctctgctatgagctggacccgtatgaattaaaactggatgagatgatcgaggcagaaccggaacccgagatgattgaagggctgcctgcctctgatgcgctgacgcctgccgatcgctatctcgaactgttcgagcatgttcagtcggcgaaaattttccccgacagtaaaacctttcccgactgcgcacctaaaatggacccgctggatatcttaatccgctaccgtaaagtgcgccgtcatcgtgattttgacttgcgcaagtttgttgaaaaccacttctggctgccggaggtctactccagcgagtatgtatcggacccgcaaaattccctgaaagagcatatcgaccagctgtggccggtgctaacccgcgaaccacaggatcacattccgtggtcttctctgctggcgctgccgcagtcatatattgtcccgggcggccgttttagcgaaacctactattgggattcctatttcaccatgctggggctggcggaaagtggtcgggaagatttgctgaaatgcatggccgataacttcgcctggatgatcgaaaactacggtcacatccccaacggcaaccgcacctattatttgagccgctcgcaaccaccggtttttgcgctgatggtggagttgtttgaagaagatggtgtacgcggtgcgcgccgctatctcgaccaccttaaaatggaatatgccttctggatggacggtgcagaatcgttaatccctaatcaggcctatcgccatgttgtgcggatgccggacggatcgctgctcaaccgttactgggacgatcgcgacacgccgcgtgacgaatcctggcttgaggacgttgaaaccgcgaaacattctggtcgcccgcccaacgaggtgtaccgcgatttacgcgcgggggcggcctccggttgggattactcttcccgttggctgcgtgatactggtcgtctggcgagcattcgtaccacccagttcatccccatcgatctgaatgccttcctgtttaaactggagagcgccatcgccaacatctcggcgctgaaaggcgagaaagagacagaagcactgttccgccagaaagccagtgcccgtcgcgatgcggtaaaccgttacctctgggatgatgaaaacggcatctaccgcgattacgactggcgacgcgaacaactggcgctgttttccgctgccgccattgtgccactctatgtcggtatggcgaaccatgaacaggccgatcgtctggcaaacgccgtgcgcagtcggttactgacacctggcgggattctggcaagcgagtacgaaaccggtgaacagtgggataaacccaacggctgggcaccgttacaatggatggcgattcagggatttaaaatgtacggcgatgaccttctgggtgatgaaatcgcgcgaagctggctgaagacggtgaatcagttctatctggaacagcacaaactgatcgaaaaataccatattgccgatggtgttccccgcgaaggcggcggtggcgagtatccgttgcaggatgggtttggctggactaacggtgtggtacgccgtttaattggtttgtacggcgaaccataatatttttacagccagccgctaacttcctgctggctgtaaaattatcctcttcaggaggagatatttaacatcattgccgcctgggtgcgatttttcacttccagacggcgatacagggattccagatgcgcttttaccgttccggtactgatattcagcgctctgccgatctccttatttgattcgcccgccgctaacatggttaaaatctcccgctggcgggcgcttaacgatttgagatctttaatgtccttttccggcgtcgtccgccagtctccaggcagaaacatcatccccatcgccgcactatttaccgccaacgcaaatgtctcgacggttgaatcacgaggcacaatggccagcacattaaaatggataacttcctgtaaccaccgtttattgcaatccgtcgccgtaattaacaccttaacctcaggaaattgcaccacggttttttgcagcaaccagtagcaaaactcaccatcctgatcgccatcgagcataactaaggcttcagggtaactttccagcttttgccataactcgtctgcctgactggccccctgaatactcactcctggaatacgctgctgtaaactgattttcattccatgaataaatattgactgcctgtcaaacatgactatttgcataactgaatctccacctgaatacgttaaaaagacttaagtagtggaagggtattacccgcgagaaaaaataagaattcgccatttggcggtggccattctacagagatgacgtgtagaaaatagttaccgatataaatagttacagctaaacgcctgaaattacatgtcgagggcactatttaaaacaattttgaggatttccttatattggtggttagtacgcatgcaattaaaaatgaaattccgcgaccacaagccaaaataacaaacggcaaggagacaaaaataagcacaaatagccaacacgtcctctgttcactttaaagggaatcgctgaaaaatacgctctgtttaaggggattcacctttctcagaaagctattccgcccttttcctgctgagaaatcgccacattcggcatgacaacattgtgaaacccggcattagatgttagaaaaaacaataaacaatgcgatatgcgcgttactgtttcgctgtgaacaacaatcggtcaaagaaatggataaaattcacgcaatgcagttgttcatcaaagtcgcggagctggaaagtttttcccgcgcagcggatttctttgctttgccaaagggaagtgtttcgcgccagatacaggcactggaacatcaacttggcacccagcttctccagcgcaccacgcgacgggtcaaactcacgccagaaggcatgacctattatcaacgagcaaaagatgtgttgagtaatctcagcgaactggacggtctgtttcaacaggatgccaccagtatcagcggtaaattacgcatcgacatcccgccaggaatcgcgaaaagcctgttactgccgcgcctgtcggaatttctctatctgcatccgggaattgagctggaactgagtagccatgaccgtccggtagatattcttcatgatggttttgattgcgtgatacgcactggcgcgttaccggaagatggcgttatcgcccgtcccctcggcaaactgaccatggtcaactgtgccagtccgcactatctgacgcgctttggttatccgcaaagccccgatgatctgacttcacacgcaatagtgcgttatacaccgcacctgggtgtacatccgttaggttttgaggttgccagcgttaatggcgtccagtggtttaagtctggcggcatgttgacggtaaacagtagcgaaaactatctcaccgccggtcttgccggtctggggattattcagatcccgcgcattgccgtgcgcgaagccctgcgtgccgggcggcttattgaagtattacctggctaccgtgccgagccgctctccctttcgctggtttatccgcagcgtcgggagctttcccggcgtgtaaacctgtttatgcagtggctggctggcgtaatgaaagagtacctggactgaccgactatactttttaagaatgaccacgacagaaggacaaaagagcggatgacgcaggaaaacgagatcaaacgtcccatccaggatctggagcacgagccgattaagccgttggataatagcgagaaaggcagcaaagttagccaggcgctggaaaccgtcaccaccactgccgaaaaagtccaacgccaaccggttattgcgcacctgattcgcgcgacagaacgctttaacgatcggctgggtaaccagtttggtgcggctatcacctatttctcatttttgtcgatgataccaattttgatggtgtcgtttgccgcagggggctttgtgctggcctcccatccgatgttgctacaggatatcttcgacaaaattctgcaaaacatcagcgatccgacgctagccgccacgttgaaaaacaccatcaacaccgccgttcagcagcgtacgactgtagggcttgtcggcctggcggtggcactttattccggcatcaactggatgggtaacctgcgtgaagcgattcgtgcccagtcgcgcgatgtctgggaacgctcgccgcaagatcaggagaagttctgggtaaaatatctgcgagattttatttcgctgattggtttgttgattgcgctgattgtgacgctttcgatcacctcggttgccggttcggcgcagcaaatgattattagcgccctgcacctgaacagcattgagtggctgaaaccgacgtggcgattgattggcctggcgatttccatcttcgccaactatctgcttttcttctggatcttctggcggttgccgcgccaccgtccgcgcaaaaaagccctgattcgcggaacatttctggctgctattggttttgaagtgattaaaatcgtgatgacctacaccctgccatcgttgatgaaatccccctctggcgcagcatttggttccgtgctggggctgatggcatttttctacttcttcgcccgtttgacgctgttttgcgcggcgtggattgccaccgccgaatataaagacgacccgcgaatgccggggaaaacgcagccttaaaataggccggatgcggcgtaaacgccttatccggcatacgattttattcggcctggctccccgtaggccggataagatgcgccagcatcgcatccggctataatgcgcacataacctcttgaaactcgtccccagagcctcttcagccatctatttgggagcaaacaatttcattccaactcataaccccagcatataaatccagttggtaacttttatttaacctgaaaccagttttatccactatttataaaattatgtgaagcatttcatagaagaaaaatcactggcctaaacattatcccctttttgcctgatttttgaccatttccgcgatttgttacacattgaaatatcacttttgctgtgcgtaatatggctattcgttagccaaaaaataagaaaagattatgcaagcaacagccacaacactcgaccacgagcaagaatacacgccgatcaactcgcgtaataaagtccttgtcgcctctctcattggcacagccattgagttcttcgacttttacatttacgccactgcggccgttattgtgtttccgcatatcttcttcccgcagggcgatcctacggcagcaacgctacagtcgctcgccaccttcgccatcgccttcgtcgcgcgccccattggctctgccgtttttggtcattttggcgatcgcgttgggcgtaaagcgacgctggtcgcctcgttgctaacgatggggatttcgaccgtggtgattggtctgctgccgggctatgccacgattggtattttcgccccgctgctgctggcgctggctcgatttggtcagggtctgggcttaggcggtgaatggggcggcgcggcgctgctggcgactgaaaacgccccaccgcgcaaacgtgcactgtatggctcctttccgcagctgggcgcaccgattggcttcttctttgccaatggcactttcttgctgctttcctggctactgaccgacgagcagtttatgagctggggctggcgtgtgccatttatcttctcggcggtgctggtcattatcggcctgtatgttcgcgtgtcgctgcatgagtcgccggtgtttgagaaagtcgctaaagcgaaaaaacaggtgaagatcccgctgggtacgctgctgaccaaacatgttcgcgtaaccgtactgggtacgttcattatgctggcaacctatacgctgttttacatcatgacggtctactctatgacctttagtaccgccgccgcgccagttgggcttggcctgccgcgtaacgaagtgttgtggatgttgatgatggcagttattggttttggcgtgatggtgccagtcgctggattactggctgatgcctttggtcgccgtaaaagcatggtaatcatcaccacgctgatcatcctgttcgcgctgttcgcctttaacccactgctcggttctggcaacccgattctggtttttgccttcctgctgctggggttaagtctgatgggtctgaccttcgggccaatgggtgcgctgttaccagagctgtttccgacagaagtgcgttacaccggagcatcgttctcttacaacgtagcgtcgattctcggggcttccgttgcgccatatatcgcagcctggttgcagactaactacgggctaggtgcggtggggttatatctggcggcgatggctggcttgacgttaatcgccctgctgctgacccatgagacgcgacatcagtcgttgtaataagagtgaaaagcctgatgcgctacgcttatcaggcctgaatttccatacaatatattgaattcgcaaggatttgtaggccggataaggcgttcacgccgcatccggcatgaacaaagcacactttgccaacaatctaaatctgtttaattgccggatgtcagacatccggcaattatcatcacttcttcatctgcgacaaaatcgtccgacactgattagcctccccttcggaaggtgagatcagtgccagtaacgccgccgccggtgttaccagcgttgccagtgccgcagcaacagcaccacgggcaatcagcggtccggctttcaccccagcctgcggatttttaaacgtcccccgcacatacagcggcgaacgcagtgtgataatccgaattcctttactctccggatcaatagtcaaatccagctgttccgaagcaaaacttgccgtgccggtaacattaatcaacgcgttctcagtatcgaaagcaaaaatctgcgggcgcgccacgccgttggcaatattcagattcgccgccgcgcagttcacccgcacctcatcatcaccaaatatcgcaccgacaatgtagttgccgacattcagcccaacaatctccatcaggttgcggctcaccagcccgtcattcatcaacagtttcaggttgccgttactgttgcctaaaagtgccgccaccgagttaccgctaccgcgtagttccgcgtcaccgttcatttcccccagcgtcttctgcatcagttccacatcgggcatcagttctttcagtttcagtcgacgagcctgaatatctgcccgcccctgcatcggctttttatcgccttccagatgaatattcgccgcaatgctgccgcccgccatgccaaatttcagcggttgcaggcgcaggtcagcatttttgaggatgatatgagtagaaagatcgctaatcggcaggctactgccatgctcaatgcgccgccctttgaagcgaacatcggcatccataacgtcccatttatcggtttcgaagcggtcataaggcagcactttgcccgcaggctgaacgcttttttcgcccttcttctgttcagaccgtttcgacttttctgcccctttcccggaatcaacgccaatcaacggtcccaggtccgccagccgcaattgccgcgactcgacatcaccttccagttttggtcgtggctttccggtggtgtagaccagagaaccgtggatatcgctatcaccaattcgcccattaaaaccgcgataatcaaagaccgacgatttttcagtgtcgattttcgctaccagccgaccatccgtttcaaacggcggggtatcgggcagcagaacgcccgtcagttcatagagatcacccagtgaatcgccagaaaatttaagccgtaaatcgacaccgcccatcttcattgggtcattcacgacgccatcaaaagcaacacgggtgttaccagagcggaaatcagcctgtaccggaaacggcgtcccttcgccacgcagcgccagcataccgcctatttttcccgtacccgtgagcggttcaccgttatatcgtccctgcgccttcaggccaaaaacgtaatcgcccaccttttctttatccgctttacctttcgatccagtaacttcgctgaacggcagcggcttgcctaagggatcaacaaaaatctccagatccgctttgcttactttgtcatcaatggcgatccgcccttgatcgaaaagaatattatccagccgaaacgaccatgccgacggctttgcattcgcgtctttgttatcatcgttggcaagattaaacgtccagttattgttcttttcagagaggcgaatcaggcgcgcgtcgggcttttcgagcttgatccacggcagccagaccgttttggtcagcagcgccagcggggccagcgttgcctctacgcgtggcaaatgcaccatcgtgacttcgggaatatccggtggattgccaagaatgatgtcttccgcgtgtacatggggccacggcacccagctgcgccagccagtttcttgtttttgccgctcccacaccacgcccagatcgccacggatagcgaacggacgattcaactccgcagagactttctggttgatagtcggtttgagtcgattccagtcaaaagttgcaatcaaaatgatcgccacgacaatcaacaacaagaaagcccctgaaatcgcagcggttattttgcctgccttgctcatcgttcgcttcctcatattcttcctgtgccagtcctaaagatagtccagccaggcggaaaatgaggcagcttatagcgccagaaccgccgtattcagcgtttctatcggtgccgggcgtgaaagaaaccagccttgtgcggcgaatgcgggcgagttctgaacatcacgccactcttccggcgtttctacgccctcgacaatcaccccgcgacaatagcgattcattagatgtaaaagctgagaaaagagtgtgcgtccttccggcgactgacgcagcatcacaaacagttctcgcgcgattttgatgtagtcataacgcacttcacttagcgcagagaaatttgccatcccggtaccaaaatcatccagccacagcgggccaaattcacacatcgaggcaaaggttgaatctttcggcagacggatatgctccaccagttcgaaacgcagccagggaagacgctcaatctggcgcaggatttttggttgctgacgcagggcgatgagcgtagggccatcaatattgaccgatgccagcaggccgtgctctataaagaagtcggctttttgcgccagcaaatcaatctgctctttcacaacctccatccgatggctgacggtgatttcagtaaaatagcgatccggcggcaggcgttgcgaagggttcaagggatgcgtgaccaccgttaatagctccacggccattaaccgcccgcatgtttgatagatcggctgccaggtgtaagcacgctcacactgcaaccaaaaacgccgttcctgcaagctctcgatgcttgcttcagggttgcttattcgctggataacctgccttatcatcaaagatgtcctgtgtttaaaagtgatgctgcccggactcgacaaagattatcggcgcgtaagggcagaactttaccgcctggccggggtaaatttcctcactccacaacggaatctttcaggaatacgttctggctcaaaaaaataatggaacactgttttaatatggttgaccagcaaaccaccacagcgcaaactaacgctaattttttacagatcaggttcacgactatgtccaaaaagattgccgtgattggcgaatgcatgattgagctttccgagaaaggcgcggacgttaagcgcggtttcggcggcgataccctgaacacttccgtctatatcgcccgtcaggtcgatcctgcggcattaaccgttcattacgtaacggcgctgggaacggacagttttagccagcagatgctggacgcctggcacggcgagaacgttgatacttccctgacccaacggatggaaaaccgtctgccgggcctttactacattgaaaccgacagcaccggcgagcgtacgttctactactggcggaacgaagccgccgccaaattctggctggagagtgagcagtctgcggcgatttgcgaagagctggcgaatttcgattatctctacctgagcgggattagcctggcgatcttaagcccgaccagccgcgaaaagctgctttccctgctgcgcgaatgccgcgccaacggcggaaaagtgattttcgacaataactatcgtccgcgcctgtgggccagcaaagaagagacacagcaggtgtaccaacaaatgctggaatgcacggatatcgccttcctgacgctggacgacgaagacgcgctgtggggtcaacagccggtggaagacgtcattgcgcgcacccataacgcgggcgtgaaagaagtggtggtgaaacgcggggcggattcttgcctggtgtccattgctggcgaagggttagtggatgttccggcggtgaaactgccgaaagaaaaagtgatcgataccaccgcagctggcgactctttcagtgccggttatctggcggtacgtctgacaggcggcagcgcggaagacgcggcgaaacgtgggcacctgaccgcaagtaccgttattcagtatcgcggcgcgattatcccgcgtgaggcgatgccagcgtaaacgcagcatatgcaaaaggctggataaagtgttacccctctatccagctcatccataaatacctgatggttgtgctaactcatcaccatcaggcattactgtgcaggtggaatatccgtcacttcaggatgtacgtcatccgtggcgacagaggtggtcgcagcggcggtagatggggccatgatttgatcccagaccgcctgcaacgctttcatgttaaattccggctcgcctttcggctgcagcagtattaacgccatatcattcgacaactgttgacgcagatcctgatttaacatctctaccgtcaggctattaaggaaatcctgccgcagtttctgatattgctccggcgcgatatcgacaacctgattttgcaacgaacgcatccgctgacccatcagaatatcggtatcagctcgtgcataggcggcaaacagtttctgcagctccagtttcttttgcgccactaacgcattgaactcttcttccggcagacctttatcgcgaaccttcgccagttcacgcgccaccagattaaggttgctgttcagcttgtcgtttggtgattcgatgttgatggcacactgcgcacgcagatacagcacacggcagtcaaatccaagaccgatgtctttgctgttactggcacttaacgcttgctgaacatgccagaacagcgcctcgcgggccaggtccgcacgccagtagcgcagcagtgcggctgattcacgaatcggctgccacggcgtatcccacatgatagataaccggtcctgacgcaccgcgtcagtcataatactcaccgcttccgcacgcagcggagaaagcgtcggcaccggagctggcgtttcacgtttgcctttcagttcgccaaacgttttgtttatttggtcgacaaccgagcgcgcatccacgtttcccaccaccagtagcgtcattgcatccggggtgtaccatttctgatagaaatctttaattttttccgcttcaacgggttgtttcagcggatcggcaggatcgtgacctaacaaggttgaccctttcagacgatagcgccaccagccctctttagtatcggcaggccaggttgccaccatgtcctgactttgcagcgcgtggttgatggtttctggtgtgatggtcaatttgccagtggcatttgccagataagagagcgcttctttcagcaaatcgttacggttattgggcaaactcagattaaacagcgtggtgtcataagagacaattaccggcggcatcgggcgtttagggtcgatcccctgctgccacaatgaacgcgcctgtgctgcgtcaaggccaccgctttgcgttagcgcaatacgagggatggcgtgactgtaaccgctctgttgtgtactttcggcgagcgaaccggtattaaccagcaggcgaatttcaacacgatcgctgggacgctggggggtggtcagcacttgccactgtaaaccgttggaaagcgtcccctgttgccatgctggatcaggctggagcgcatctgcctgcacatagccagcagtggccatcatcagcaaaccgcccgctaaaagtcgaatttttgtgccctgcatgtgaacccctgatcaactatcctggtaataaaaaaactgcccgttgtcggtcagtctaaatgacgttaaaaacacttcgtgttagaccgcaagaacatgaaaatgtcacggaagaagtgaaataaacctgaactcacccaggtggtaagttcaggcacaggggtcaattatgcgcaaacacccgcactcggggaagggagtgcgggcataagtgatgagattaagaggataattcgtgcgttttgccatccggcgcacgattattcagcacatcgtccagttttttgtggtccagttctttcacccacttagcaacgacaatggtcgctacgccgttaccgaccaggttagtcagcgcacgagcttctgacataaagcggtcgataccgaggatcagcgccagacccgctaccggcaaatggcccaccgcagagagcgtcgccgccagcacgataaagccactacccgttacccctgccgcccctttagaagaaagcagcaacacgattaacagcgtgatttggtggacgatatccatctgactgttagtggcctgggcgataaacaccgccgccattgtcaggtatatcgatgtgccatcaaggttaaacgagtagcctgtcgggatgaccagccccaccaccgatttacggcagccgagtttctccatcttgtcgagcatacgcggcagcgccgactcggaagatgaagtccccagtacaatcagcagttcttcacggatgtagcggataaatttgaagatactgaaaccagtcgctttagcgattgaacccaataccagcaccacaaacaggatacaggtaatgtagaaacagataatcagctgccccagttgcaccagtgtgccgacgccgtatttaccgatggtaaacgccattgccccgaacgcaccaataggtgccagacgcatgatcatattgatgatgccgaagatgacctgcgagaaactttcgatgacgttaaaaatcagttggcctttgctgcccagacggtggagcgcaaaaccaaacagtacggcaaacagcagcacctgcagaatgttaccgctggcaaatgcgccaatgacgctcgccgggatgacatccataatgaaggcgacaatgccctggtctttcgcctgatcggcgtaaaccgctaccgctttcgcatcaagcgttgccggatcgacgttcattccggcaccaggctgcacgacgttaacgatgataagaccaataatcagcgcgatggtactgacaatttcaaagtaaagcagtgcgactgcgccggtacgaccgaccgccttcatgctttccatgcccgcaatgcccgttacgacggtacaaaagatgacaggagcgatgatcatcttaatgagcttaacgaagccgtcgccaagcggtttcatttgctcgcctatttcaggatagaaatggccaaggagaataccaatggctatcgctgtcaggacctgaaagtaaaggcttttaaacagagaggttttcatagggtgtcctttagtaaaaccacaggtcttgtaaggttatggggtacctgcggccttaaaataacacccagacaacatcacagaaatgtacctggatcataattgaaacaaaaaggttaaaaagtttgagctggctcgcacaaaccagcactttttaaagttttgtaatcagtttggggtagctacttttcttccaggtaactctcttcgaagatttcaatagggagtgggcgagcaaaaaggaagccctgggcaataccaacgcccgcttttgccagccagtcgcgttgtgcttcagtctccacgccttcggcaatcatttgtaagttcaggctctgcgccagcatgataattgcagcaatcatgctgctatctcccggcaagccttcaacaaacattttgtcgattttcagtacgtcgattggcaacgatttcatatgctgcagctgacgcagccctgcgtagcccatgccgaaatcatccagcgccacccgaactccggcattgcgcagcggacggaggattgccaccgcagcatgagggtcgtcaatacgtcggctttctgtcacttccagaatcagtgttcccggctgaatgcgatagcgggttaacagttccagcatatccgccaccatattcgggtgcatcagttgcagcgcagagaggtttaccgacaagggcagcataatgccgcgctcttgccaggctgcaagcaatcgacaggactcttccagcacccagtgaccgacggtaaccatcagcccacagcactcaatgcgatcgattaagccatccggcaggtcccaactgccatccggttgctggatacgcagtaacacttccgcactgaccagtttaccgctggtcatctcgacctgtggctgtaaccaaatagcaaactgatgattttccagtgcattaaggatatcgctctcttccgtcaaccgcttctgggcggcttccatctgctgcggatcaaagaactgaatctgattcttgcctttatggcgagcggtaaatgccgcagaaatagcgcgactgtaaagctgttcggcggtgagatcgccgtagaacatcgccacgccaatgctacagtgcggacggagttgaatacgttcaatcggcaggcgctcgctcatgatagtgagcacttgctgacctaaggtgattgcgtgccacggttcctgtacaccgttggcaatgacagcaaagtcataaccgctaatctgcgcgaggatcatacgtggcgacagtaccgatttgagtttttccaccagcgtcagcagcagaatttctcgttgcgcctctttcagcacgcccgcagtatcacgcagggtttcacaggtgatgatcatcagcgcggtggtttgtttacgcgcgacaacctgctccagcatctccatcagcaaggctttgttcggcaaatccgacaccgggaagcgcatcgcattttcgttctgttcttcataatggcgctgcagcaattgctggttgaggttgtaactgcgcaccaacataccgatttcatcgtcctgatgcagacgcggtaatgccagttggtgaccaacaagctccttggctgggatggcgttaagttcgcgagcaatattgcgtaacggatgcaaaatcaggcggttaatgcaccagctgatggcgacggtcaggataagcgacaaaagtaagtaaatggtcactaacgttgagagggtgctcatcacgaacttatacatacggaaggaatccgcctgtagtaccagataggcaattggctgcgggtttgccggacgttcgagcgagtaaacgcccagcgagatttgaaccggtagctcaaacaggcgagtaaccattaccggcaccgggcgctctggaataaaacttttacgcagcgcctggaactggttaggcagcactacatcggcacggctgaccacgcctgccggtttaatgctggcaagaatagcttccgcttcgggaatatcgcctttcaaaatagctgaagataagggttcgcggacagagcgagcaatgctttccagttgcgtagccgtgttatagcgattctgctggaccagatggaacagcaaaacggtgcaaaaaataaaaacgaacaccaggacaacggctgccaccattgccatctgcttgattgttaacgagcgacttacgcgcaaattgtctccccccggaaatcccagattgccgcccgagtatacccgatcgcagcggcattaagagaggcgctatctgaaaacttaccagtcggcgtaaggtatcagcggctgcggcggtaaatccatgtcaccctgccatccggcggcggaataacgtacgtagagcaggaaatggctgggtgcgtaatctttcgcctgctggatatcaattgccgtgccaacaaaccagttggaagtaacacgtcgttcaagtaatgcccgcgccgtgtagccgaagccctgactgctgccgccatcgttggattgccgcgcagcttcttcctgccagtcggtcgggatcagattcatcagcggataacgcggcatggttttggtgcgtgaatgcgaccacgagccagacgcacccagctcccacgaccagttttccgtgcgctcccgccacatcaccggtatggcaaacgacaggtattcctgcggactgtagtaaccgccctgaccgagtgagtagccactcagatctttgtcgtaatgccagatcatgttgttcaggccgattgtgacgcggcgattgttctggttaatgaccttatagtaatagcccgtcatccagcgcacgcgccagttatcttcgacatttttaccggttaactggtcgccactaagcgatgcccagacgccgtttgcttcacctttatcgtagctcagacttagccccacaccgtcggcacgtacgccaccccattttttcccggtattgctcggggagtctttttgcccaccaaaggccagcaaagaactggagatgggccgacggtgggcgttaacggtgtaacccagcggcccgatatcatcgctgtaactgatgccgccgaccacatccaccacgttgaagcccatcggcgtggtaccgatatcccagctccagacgtcatttcgccagccgaccgccacgctggcaccggaatccgactggctgcggttgccgctacagtcctgtaatgtacaggtgccccagttgtcatcccatttgccatcggcattagtggagaaactgccgacgttcatattgacgaaatcactgcgaaagaacatccgcccgtcagaatacggcgcatccacctgcaacatggtagtgtgcgctttcagatcggagtaaccaccggtgccgctcgaaccccagtaatcgtgctcaagggtgacgttaagatcctgctggcgatagaggtccgccgcatcgctgcgcacgccacgtttcagccagtcatctttctcgtcgttacgggtcagtcgggtaaaggtgtcgttatcctgcggacgcgtcgtagtcacaccggatgcgaccatggcgtctttgtaggtttccagcgcctgcgttggatcgcccgcctgcgcttcaaacttcgcaccatcacgcagcaccatcgcgctttccatcgacggtggctgagattttgcctgcgggatcaacttattaaacgtccgctgcgctgctgcggtatcgccaagctgcgcctgtgccagcgccacgcgccgctgtgtgttcagcgaggcgttatcggtagcgggcagtttcgccagctggctacgtgccgccgctttgtcaccggcagcaatatccacttccgtcagaccaagaatggcgtcggcgttagctggctcccgcgtcaggacattctgatatgcagcgcgggcggcggtgtaatcacgtcgttgttgcgcccagtcagccagcgtgaggtcaatacgcgtggaaggtggttgctggcgcagcatcgcttccgcttctgcctctttgccgctttctcgcaggcggttagcggtttccagcacctgatcgctttgcagtcgattaaccagctcctgaatattgctgttccactgcgcacgcggcaggctattgatatgcgccagcgccgctctgtcctggtcatgaccagagaggtacagcccgtaagcgtaaacctgctccgggtcgttcgacttctgctgcgccagattgcgcattaacgtatcggcctggctgcgttgtccggcctgccagagatcctgcgaaagtcggtaagtaatccatacgctgccggggtccagcgccagtcgttgccgctgaagtgctgccgcctgcgcccatttgccctggttttccagtgcctctgcctgctgtgccagacggtcgttttgcaggctgcgttcgatatcatcaatgctacgccgctgactggcagagagcgaggcgataaacgcttcagctttttctggcgattgctggcggtaaatatttgccagcccgcgcacggcgttagtgttgccgctgtccatacgcaaggtctgctgataataacgttcggcggcgggataatcttttcgcgccatcgccacatcgcccagccccagcactgcataactgtcggtgttatcgacattacgcgcctgctggaacaggcgttctgcccggtcaggattattggctttcagcgcagcatcgccctgctggatcgccagccagtagcggtttactttcagcagactgttccatttgtcgttgttgctgctgtgcgggtccagtgcgagggctttttccagattcgccactgcattggcgcgatcgcctttctgagaatacgcctggcccagcgcccccagagcttcactgtctttcgggttcgcccgcaccgcctgttgtagttcgggaatggctttacccgccataccagagtccaccgccgctaaaccttgcgcacgagcgcggaaagcaggatcggccagctgtttttgctgttctgccagttgcgattgcgcagccgccacgctatcgccatcactaaagatcgagagatattttttcagcgccgacacactggcatcactgacgggcatgtctttaatctgcccgtaccagattttagaggccccttcgcgcccggcgttcgattttgccatctgttccaggacggcaaaaccttcgtcacggcgatcgctactaaacagcaatagcgccagattgttttgcaggcccgtattgcccggtgcatccgcattgatgcgttttaactgattaatcgcttcgccacggcgagccggaattttcgccaccgtactccagtactcgacagcaatgtcaccttccggcggcgcaccgttgaacagtttgttgtaactcgccacagcttcttctgcatgaccggtcgtcgcctgcaatcgtgcctgttgcagtgcctgacgaccatccggcgtggaaagtagcatcgtagtccgcgacgatttatacgcatttgaactcggcgctaactgcgacagccgatcgagctgtttttgcgcgccatcaatatcgccctgacgtaacaaagaacggaaacgggcggcaacgacgtccgggttattcggatcaataagttccagccgatataacgactgttgcaccagatcttcacgatgggtcgcttcgcctaaccgaacttgctccagcaactgttgctgagcggttggtgctgcctcgaccatcggcatgacggccagaccgagggaaagcggaatatgtttagtgtgaatttgcgcattcctggccccagtcaggtaataactcaccttttgtcgagaagcggaaacggtgttgatcccagccttgtccaaacagggtcagcacatagttgtaataggcatcgctgccgggaaagttatcggccacgcgctggcgctgaacggcctgcgcatcgcggttttgtaaaaagggcagcatggcggcagaaaaaccgactggtcctttaccctgcgctttccccgtagccacatccactttttccggcggataaccgtttttctcagtgaatgtcgccatcggtttaaaccggttgagcatccgcgctttttgcggatcgctgtcaggcatcatgcctacccacatgtaaacgcggatagcgtcgtagctgctgatcaatgttttttcggcttttagctgccagcctttgtctttctcatagcgcacccagtctggcgaaaaacctttcggggcggtttccagcaataaacgttgattggtttcgcgcagcgtggtccacggcgcgccaaagcgggtgaaatactgcgccagcgtcggcggcaggtagctggggttaaaacgccagctgttatcctcagcaaaacccactttgcccggtaacaacatggaacccagcccaggcaccgtcaccacttcctcccgcgcgatacgttttagcaacgcgctgccgatgtcggtataacgctgctctttccacaaacgccccgcctccagcaacgaccaggccatccagacatcaccatcggaggccgaattgctgtccagcacttcccacttactgttctctttcttgccccacagccaggcgggcaaacgttcttttaaagaaccctgagcgagattgttctgcgtccagtcgagaatattatcgaaagctgcacggtcgttagccgccagggcagagaacatgccgtaactttgcccttcggaggtggtgattttgcgcgcgtcgctggggtcgatgacgcgcccttcctgactgatgtaatcctttttaaactgctcccaggcaggccaggtacaggctgcctgaacactaaaggcagccagcagcagcatcgtcacgattccactacgcaacacattcatcttcaattactcgttatccgggttaagacgacgacgactaataattcgcagcagacgccacagtacccatgccagcaatatcacactgatagccgccagcaccgccagcagaatcggatggtttgccagcgcataccacacgcgctcgaaccacggcagatgacctacgtaataaacgtcgccaacacgtaggctgttgataccggactcgcggatcaccgcgaccgaaccgaacatggtggcgcgtttgccgctatcgttcaccgcatcgttaagcatttcataaccgcgtgggctatctgccaacagcgcaatcacgctgcgctggtcgttatacggcgactggaagccaatcaccgccgccatcgcaccggaagaggtcagcgttgaccgggtttctgccgcgcgatcgctctcgtccggcacaatgccggggaacggggtctggcgcatcggtgttttcacccagctttcggtcgcctgcaccaataggtcgatctgcttatcgtctttcagtttgtccgggataccaccgatgatcatgatgtcggcatctttgccctgaatggtgctgccatcatcggtcaccgtcagattaatcgccgggaagcccgtctgtgcgccgataaaaccaacagtattcagcaacgtttccatctgtgcttcgttaggcgctttcggcatcacggtgatggtttgcgacagatccgccatccggctgaatgggaagcccgcgttagcaaaggcgcgtagatccggcatcgggatgaagtggtaatacttcgagaagtcgatggtggagtcgtcaccaatcaccacatgattctgcaccggctggaaggtaatacagttatccaccgaaccgcccggcatcgggttcatatactcaaagtcgaagcgcagctggttggtcgcgcccagtttcagcgccggaatagagacatctgttttgccatccagcaaaccttgtaataccggaatccgcagcagcaggcggttcgcctcctgtttgctgctcaggttgaaggattgcaggaactggttattcaggctgatatccatccgcgaactgtctttcaccggcggcatggtgtagcggtaattaatatccatatcaatgccggtactgcgcatcaggtagagatccggcggcaggtttagcgaaacgttaatcgctgctggctcaagaccgctggattgtaactgttcttcataggttttcagttcgccaaatgtgaccggacgatcggtacgtacccagttcggcgcatcgtacggcttacgcggtagcagcggtttcacttcattcactaccacgctttcaccacggaacagaatgttaccctgagcgatacctttcgctgcctgcaacaggtctttgtcgtcacgaccaaacaccaccagcagtttgacgtaaggattctgcggatggttaatcatctcaatcaccggggcttttaccgccggatgatcgcgcaggaagtccggccgtttgtcgttggttgcaaagacaatggcattgcgatccggcagttggttatagagtaccgggaagttctgcccacgccagccagaacgcgaaccaaaccacgaggcgacaatggcagaggcttgttgcagcccaacatccggcgcacccgcaaagaccatcggcaaggtgttggtgcggttatcgctcgggtcaaagaatggcaccgggaagtgtgacaggtcattcttcacattcagggtctgataggtcagatccagtccactgctccgcccaacatccagccaaagcgtggtgctggccggtttttcgcacacgtcctgataatggccgacaaactccagccgtacacggttgaagtcgctaataaacagtgggttaatgggcatttgcgccagcgtttttttacccaactgttctttggtcactggcagcacgcccatcagttcatcattgagataaacctttaactgcgactggacaggcagtaacgatggcgatggggtgtattcgaggttgagcatcgccttcgtcaccacttcatcgctgcgcataccaaactcaatgctgccgttcgggttaatgccacgtagcaccatgctgcccggcggcggtgcaatttgcgcaaaggtcagcttcacatcacgcgaaggaccgttctgcgccacgactggcgcatcagcgccctgcacgcccggcatcacttgccccacctgcggattttgttccgtctgggcggctacagctggctcagcattgatcagtggttgcgttgctggcgtcgcctgcgtcatgaaagaggggaacgcactcatccccatagccactgcacaaatccagaatagttttcttttcatcgcgttatcatcattgttgagccaaagcctgatccgatggttgtgccgtttcgctccgctccgggcggcgcggaataaacgatacaacccaggaaaccagagaagtcagcacacggaatatgcccttcaccgaagaaggcgcaaactccgccagatggcggtagccacggaagccgagcttcagaatatccagcagactttccagcggcttatcttccgggtagctgtcctgccagagcgcccatgtatccgcacgggcaaacgtacactgcacaaaatcgatatgttgctgggtggtgagcggcattaatttcagcccaacttcattacccatcacgcgcgccacctgggtcgggaagacgtattcctgctgaccgcgtttaagcaacagattcactttctgcccttccagaatctgcgcctgaccgttgatcttgatccccaaaccaccgtcggagaaatcctgaacggtacacgagaagaggtgaccatcttcgcgggcaattgccgcgggcatcgtcatctccacgcggtgcgatcggcgtacctgtttgctttctaccgataccgcaactgcgccgccaagaacaatcaggttgtagaacacccacaccatactgacgaccacggtgagcatctcggttggcgggccatagaagtagcgccagatgcctaccgcaacgcccaccaggttgagcaggacaaggaagatgtagggccgcgagatcacccagtcgacgtactcttcttccaccagtccacctttggcggtgacgttaaatttgcctttgtgcgggttaatcagcgccaccagcgtcggtggtgcgatataccacgccagcaccgtttcgtagatttcactccagaaagagtggcgatatttgccctggatcttggagttggtcaggctggcatggatcatatgcggcagcacgaatagggcgatcatcaacgctggcgcatagatgatgtaggcatgaagcagcaggaacgccagcggcgcagtcaggaagatcagccgtggaatgcccgacaagaagtggaacatggcgttgacgtaacatagccgctgagcaaacttcagccctttaccggtgagcgggttatcgagacggaagatttgtaccatcccgcgcgcccagcgaatacgctgaccgatatgcgccgacagactttcggtcgccagccccgccgcctgcggaatacgcatatacgcggaggtatagccacgacggtgcaaccgcagagaagtatgcgcatcttcagtcacggtttcgacagcaatgccgccaatttcatccagcggcttacgacgaatcaccgcacaggaaccgcagaagaaagtggcgtcccacatatcgttgccatcctgcaccagaccatagaacagcgtgccttcgttcggcgttttacggaaacgccccaggttgcgttcaaacgggtccggtgagaagaagtggtgcggcgtctgcatcatcgccagctgtttttctttcaggaaccagcccatggtcatttgcaagaacgatcgcgttggtacgtggtcgcagtcgaaaatcgacacgaactcgcctttggcatatttcagcgcattgttgatgttgcctgctttcgcatgttcatgagtggtgcgggcgatatatttcacccccacgttttgcgcaaactggcgaaactcttccctgccgccgtcatcaaggatccagatattcagcttatctttcggccagtcgatacccagcgaggcgtaaatggtatttttcaccacgttgagatcttcgttgtaagtcgggacaaagatatccaccgacggccacagcgacatatctttcggcaatggcaccggctgacgattcagcggccatactacctggaagtagccgagcaccagcacaatccacgcgtacgtttcagcgaagagcagaataagcccgcacaccaggctgaccggatcgtcccagttcagcgtagaggtgtaacgccaccagatataacggcaagaaacggtcagcgacagcacaatcaacattagcgccgagaagcgccccggcatccgccgtacgatcagcgctaccccccacagcagcatcaggaagataaactgcgccagcgggttaaacggctgagtaacgcagattaacgccagaatcagcgagaaggtgacgatgataccgaggatcaaccgccgcgccccggcactcaaatgaccgagctcttttttctcatccagatgctgtgttttatggctaacgcgctcaggcagctcgttcatccattgatggtaacgtccacgaatattttgcagacctgaaaatgcccgcctgcgcggtttcggcgtttctttgcgcgatgcaccgatcaataaccagcatgtttgaatgagataacggaccgggtccagcggacgcggacgcgaggcgttgatatgcggatacaggtttttatgttctgcgcgaatacgctgccagcgcgggtgctccagcggaataaaaatccaggccaggatcatccagaaacagccgagcgtcgcgctgaaagccgacgcaccgtgacgacgataatcgcgataacgcccgataagccgcgcgttgaccggcgggataagcaaccaccgggtcaggatactcatgatgcactcccgactggcgttttcagcccggagtagttcaacaggcaccagttcgccagcgtcagtatctcttcagccgccagcgcatcactgcgatattcacctactggttgcttagccgccaggcattcagccatcgcttcatcacgatgaatgagcatcggcagtaatcggcgctggctttgcaaccaaagctggtaaatatcgtcctgaacctgactgccaatacggaagtcattaatcaaaatatgtgcgccatccggcagcgcttgctgatgcagtcggatatggcagttggcatccacattgacgattgccagcgagtgatcgcacaaactcagcagctggtgggttatctgcgaggcatcacgcggtaagtcgattaaaatccactggtaacgcccgctggcttttagttgctgtaagccggagcaaatatcgctcagccgggtttgccagtgctgtggattttcttgttcttcaatggataactgaccaaaaggcagcaaatcgagctgcgaggtgtagcgcaacccagcgtcacgccagtcctggccatccagcatcgctctggcccagccctgacggtgggtaaaatcaacattaaatgacaggcgcaacaagttgtccgggcaggcatcgaccaccaggacattttctcccaacatttgtaatgaccaggctaatgcggcggtgatggttgttgtccccacgcctccccgcaccccctgctatcccagtacggccattcaccaatcccctacttttgttgcgcaaactctgccagcaacggccagcgttttaatgccgcggccaactgttcgcgttgggaaatatcggcataatcaatatcaggcagtgaaaatgcctgctttaacgccacaatatcattctggaagatatagcctatcgcgggatcaggcagagtatctggttcattgttattcattttgcttgatccctatgaaataaccgtaccgttcatgagacaattctaaccgtgagcatttcgccggtttattgtttacggcgagacgggaatttgctcactttttgactttccgttacgcaacagaaaaagttaaaaacgaaaagactaaaatcacacgtcttgtgaccttctaaattgattcacatgctaaatctgataagttttaatttcaatggtaggtttatttcttagctttcgctagtaaactgataatcagacaaaatggtgacatgagggacattgtggaccctgtattctctatcggtatctcatcattatgggatgagctgcgacatatgccagcaggcggcgtctggtggtttaacgtcgatcgccatgaagatgctatcagtctggcgaatcaaacaattgcatcccaggctgaaaccgcacacgtcgcggtcattagcatggacagcgatccggcgaaaatctttcaattagatgattctcaagggccggaaaaaataaaattattttcaatgctaaatcatgaaaaaggtctatactatttgacccgtgatttgcagtgttctattgatccccataattacctttttattcttgtttgcgcaaataacgcatggcaaaacattcctgccgagcggcttcgctcatggttggataaaatgaataaatggagcaggttaaaccattgttcgcttttggtaattaatcccggaaataataacgataaacaattttcattgttgcttgaggaataccgttcactttttggtcttgccagtttgcgttttcagggtgaccaacatttgctggatattgccttctggtgcaacgaaaaaggggtcagcgcccgtcagcagcttagcgttcagcaacaaaatggtatctggacattagttcaaagcgaagaggcggagatccaaccacgcagcgacgaaaaacgcattctgagtaatgttgctgtactggaaggtgcgccgccgctatcggaacactggcaactgttcaacaataacgaagtcctgttcaatgaagcccgtaccgctcaggcggcgacggtggtcttttctttacagcaaaatgcgcaaatcgagccactggcccgcagcattcataccctgcgtcgccagcgcggtagtgcgatgaaaatcctcgtgcgggaaaataccgctagcctgcgcgccaccgatgaacgtttgttattggcctgcggtgcaaatatggttattccgtggaatgcgccactctcccgttgtctgacgatgatcgaaagcgtgcaagggcagaagtttagtcgctatgtgccggaagatatcactaccttgctgtcaatgacccagccgctcaaactgcgtggtttccagaagtgggatgtgttctgtaatgccgtcaacaacatgatgaataaccctctattacctgcccacggtaaaggcgttctggttgccctacgtccggtaccgggtatccgcgttgaacaagccctgacgctgtgtcgccctaaccgtaccggcgatatcatgaccattggcggtaatcggctggtgctgtttctctcattctgtcggattaacgatctggataccgcgttgaatcatattttcccattgcctactggcgacattttctcaaaccgtatggtctggtttgaagatgatcaaatcagtgccgagctggtgcagatgcgcttgcttgccccagaacaatggggcatgccgctgcctttaacgcaaagttctaaaccggtcatcaatgccgagcacgatggtcgccactggcgacgaataccagaacccatgcgactgttagatgatgctgtggagcgctcatcatgatgaccatcagcgatatcattgaaattattgtcgtttgcgcactgatatttttcccgctgggctatctggcgcggcactctttgcgacgcattcgcgacaccttacgtttgttctttgctaaacctcgttatgttaaaccggccgggacgttacgccgcacggaaaaagccagggcaaccaaaaaatgactcaatttacgcaaaataccgccatgccttcttccctctggcaatactggcgcggcctttccggctggaacttctattttctggttaagttcggcctgttgtgggcgggatatcttaacttccatccgctcctcaatttggtgtttgccgcgtttctgctgatgccccttccgcgctacagcctgcatcgcttgcgccactggattgccctgccgatcggctttgctttgttctggcatgacacctggttgcctggcccggaaagcataatgagccagggttcgcaggtggcggggttcagtaccgattatttaatcgaccttgtcacacgctttattaactggcagatgattggggccatttttgttttattagtggcctggttattcctgtcacaatggattcgcattaccgtttttgtggttgccatactgctatggctgaacgtacttaccctggcgggaccaagtttctccttgtggccagccggacaaccgacgaccactgtaacaacgacgggtggtaacgcagcggcaaccgttgcggcgacgggtggcgcaccggtagtgggtgatatgcccgcacaaactgcaccgccaacaacggcgaaccttaacgcctggctgaataatttctataacgcggaggcgaaacgtaaatcgaccttcccgtcttcgctgcccgctgatgctcagccatttgaactactggtgattaacatctgttcgctttcctggtcggatatagaagccgccgggttgatgtcgcatccactgtggtcgcatttcgatattgagttcaagaactttaactccgccacctcctacagtggcccggcggcgatccgtttactgcgcgccagctgcgggcagacttcgcacactaatctgtatcaaccggcaaataacgactgctatctgtttgataacctttcgaaactgggctttacccagcacctgatgatgggacataacggccagttcggcggttttttgaaagaagttcgcgaaaatggcggcatgcagagcgaattgatggatcaaacaaatctgccggttattttgctgggctttgatggttcgccggtttatgacgataccgctgtgcttaaccgctggctggacgttaccgaaaaagataaaaacagccgtagtgccacgttctacaacacgcttccactgcatgacggcaaccattatccgggggtcagcaaaacagcggattacaaagcgcgggcgcagaaattctttgatgaactggacgccttctttactgaacttgagaaatcgggtcgtaaagtgatggtggtcgtggtgccggaacacggcggcgcgctgaagggcgacagaatgcaggtatctggcctacgtgatatccctagcccgtctatcaccgacgtccccgttggggtgaaattcttcggcatgaaggcaccgcatcagggggcaccgattgtcatcgaacaaccgagcagcttcctggctatctccgatctggtggttcgcgttctcgatggcaagattttcaccgaagacaatgttgactggaaaaaactcaccagtgggttgccacaaacagcaccggtctccgagaactcaaatgcagtagttattcaataccaggataaaccgtacgttcgcctgaacggcggcgactgggtgccttacccgcagtaagaacgaaaaaggccgcagagtttcccccctgcggcctggtccgggcgcaaattgccattacggcagcctgacgcccgcatgacacgttacttccgcttgttcagccagttcacgatcatactggcaagaatgccagcaatgaccggagccgctaaatcatgccagaaggccatgcccagctctgcgaacgtcatatagccgcctgtgttgtaatgacaacgtttcgcggctattcttgagtggtctagagtcaagattagcccccgtggtgttgtcaggtgcatacctgcaacgtgcgggggttttctctctccagcaaccaatgccaccagggataaagcccccgcaacattgcgcctcaccggaacctttccggcttgccgctgattctacgattgctttttactgtcagcacccggcaatcttcctcattgcgcgatgccttccagcttaatttctttatttgcaatagttgcagttcatatccgggctgactccagactggtagtgaaatgcgcaattttgtagaattgcgcctcctcgcgacctccccagtgaatctgttgcctcattttttacatactgcgtattcgacttctccacctgttgcgcaagagaaactgggtttattcatttttgcgaggccgacttctttctggacaggactttatgcagcacaacacactatcgaaacacaatcagaaattgccgtttacacgctacgacttcggctgggttttattatgcataggcatggcgattggtgccggaaccgtgctgatgccagtacaaattggcttgaagggaatttgggtatttattaccgcagcgatcattgcttatcctgccacctgggtagtgcaggacatttatttaaaaaccctttctgaaagcgattcctgtaatgactacaccgatattatcagtcattacctggggaagaactggggaattttcctcggggttatctactttttgatgattatccacgggatttttatctactctctctccgtggttttcgacagcgcctcgtacctgaaaaccttcggtttaaccgatgccgatctttcacaatctctactttataaagtcgctattttcgccgtactggtggcgattgcgtctggtggtgaacgattactgtttaagatttccgggccaatggtggtggtcaaagtagggattattgtcgtgttcggttttgcgatgatcccgcactggaatttcgccaatataaccgccttcccgcaagcctccgtctttttccgcgatgtcttgcttaccattccattttgcttcttttctgcagtatttattcaggtacttaacccaatgaatattgcctatcgtaaacgggaagcggataaagtactggcaacccggctcgcgctgcgtacccaccgaattagttatatcacgctcatcgcggtgatcctgttttttgccttttcgtttaccttctcaattagccacgaagaagccgtttctgcctttgaacaaaatatctcagcactggcgctggccgcgcaggtgatccctgggcatatcattcatatcacctctacggtgcttaatatctttgccgtactgaccgcattctttggcatttatctcggtttccacgaggccattaaaggcattattctcaatctgttaagccgaattattgataccaagaaaattaactcacgcgtgctgactctggcgatctgcgcttttatcgtcattacgttgacgatttgggtttcgtttcgtgtatcggtgctggtgttctttcagttgggaagcccgttatatggtattgtgtcgtgcctcattccgtttttcctgatctataaagtcgcacaactggaaaaacttcgcggatttaaagcctggctgattctgctgtacggcattttgctatgcttgtcgccactgttgaagctgattgagtaaaccggagcgcatggccccggttttgtgagttaacgctgcggattttcatcctgatcaacagcaaaacaagctaccagttgaccgccgtagtcttttagctgcggctgcaactgggtgcaggggccgaagcgccgacgacagcgggcgttgaaggcgcaacccggcggtggattcagtgggcttggtagttcaccgctgagcttgatgcgctcgcggcgatcgtccgggttcaggcgcggcgtcgcggaaagtagcgcctgagtgtacggatggcgcgggttattgaagatttggtctttcgttcccttctccacgcagcggcccaggtacatcaccatcacttcatcagcaatgtgctccaccaccgacaggtcgtgggagataaagacataagacagccccaactcctgctgcaaatccatcatcagattcagcacctgcgcgcgcactgaaacatccagcgcggaaaccggttcatcggcaatcaccacatccgggtcgagcatcagaccacgggcgatggcgatacgctgacgctgaccgccggagaacatatgcggatagcggtcatagtgctcggttttcaggccgactttcgccatcatcgacagggctttttcccgacgctgttctttgcttaagctggtgttgatcagcagcggctcttcaagaatttgcccgacttttttacgcggattcagcgaaccgtaagggttctggaagacgatctggattttctgccgacgcagcttctgcgcctgcggatcgtgcttaagcagatcctgcccctggtaatacagctcgccaccggtgggcatttcaatcatcgtcagcaaccgaccgagggtcgatttaccgcagccagattcgcccactactgccagcgttttgccacgttcaaggttaaacgaaacgccatccagcgctttaaccagacgttccggcgcgaacatgcctttcttcaccggataatgttttttcaggtcgatagcctgcaacagcggttgttgcagggtggcctcttgcgtactcatagtgtcggcctcccggcatcatcaagtgggtaatggcatttggactgacgcccgtcagcgagcatattcagcgccggttcttcagcgcgacatctgtcagtggcataggggcagcgcgggttaagcaggcagccgttcgggcggtcgtacttgccgggaacgacacctggcaacgacgccagacgttctttgtcctgagcaaattctggcagcgcacgcagcaatgcctgagtatacgggtgacgcggcgcatggaagatggcgtgcgcatcaccggtttccaccacctggcctgcatacatcacgatgattttatgtgccgcttccgccaccagcgccaggtcatgggtaattaacaccagcgccatgttctctttctgctgtagctccagcagtagttcgatgatttgcgcctgaatggtcacgtccagcgcggtggtcggttcatcggcaatcagcagttttggccgacaggcaatcgccatggcgatcatcacgcgctggctcatgccgccggaaagctgatgcgggtaaacatccagacgcgatgccggatcgggaataccgacctgattcagcaggtcaatcgctcgctgacggcgggtacttttgttgccgccctgatgcaccttaatcgcttccataatctggaaacccacggtgtagcacgggttaaggctggtcatcgggtcctggaagatcatcgccacttcggcacccaccaggttgcggcgctctttttctgagatacgctgcaaatcctggccgttaaactccagtttttctgccattacgcggcccggataatcaatcagccccataatcgccagtgaactgaccgacttaccggagccggactcacccacaatcccgaccacttcgccctgttttacgctgtagctgatgcggtctacggcgcggaacggcgcgctttcgtcgccgaaatgcaccgataatttatctacatttaataacgccatctcgaacctcttactgcttcagtttgggatcgagcgcgtcacgcagaccgtcacccatcaggttaaatgccagcaccgtcagcaggatcgccagacccgggaaggtcacgacccaccaggcgctttgcgcgaactgcaacacgtcggagagcatggtgccccactcaggcgttggcggctgtgcccccatgccgaggaaaccaagagcagccatatcgagaatggcgttagagaaaccgagcgacgcctgaacaatcagcggcgcaaggcagttcgggaagatgttaataaacatctgacgcatcgccccggcacccgccacgcgagacgcggtgacgtaatcgcggttaacttccaccagcacggcggcgcgggttaagcgcacatagtgcggcaaggcaacgaaggtcagtgccagcgcggcgttaccaatcgacgggccgaaaattgccaccagcaccagcgccagcagcagacttggcagcgccagcatgatatcgaccacgcgcataatgatgttatcgaccaggccgccaaagtaaccggcgatcaggccgagaataacgcccataatcagcgataacacaactaccagacagccaaccagcagcgacaggcgcgcaccgtacatcaggcgcgacagcacatcacggcctacgtcatcggtgcccagcaagtgcgccatgctgccgccttcctgccaggctggcggggcgagcagtgcatcgcggaactgttccgccgggttatagggtgcaatccagttggcaaagatcgcgatgaacagcacgatgacgacgtaaaccagcccgacgaccgcgcctttgttgcgtttaaaatagtgccagaactcctgtaacggggtcatcggcaccggtgcgctaatcactttattttcagtaacctgtgacatgatgtccccttacttcttatgacgaatacgcgggttcaccacgccgtacagcagatcgaccagcaagttgacgaggataatcatcgtcgccaccagcaatacgccgccctgcactaccggatagtcgcggcgttgcagtgcgtcaatcaaccagcgtcccagaccgggccacgagaagatggtttcggtcagaatcgcccccgccagcaatgttcccacctgcaggccgataacggtcaccaccggcagcatcgcgttacgcagcgcatggacgataatcacccgcatgcgggttagccctttggcgcgcgcggtgcggatgtaatcctcgcccagcacttccagcatcgaggagcgtgtcatacgcacaatgaccgccagcggaatagtacccagcacaatggcaggcaagatcatatgggcgacggcatcgataaagttgccgtcttcaccccagatggcggtgtcgattagcataaaaccggttaacggattggagtcatcgaggaacaccatatcgctcacgcgaccggagacgggcgtcaggttccagtgcaccgaaaccagcatgatcagcatcatgccccaccagaagataggcattgaataacctgtcagcgccaggccaaccgctgtgtgatcgaaaatggaaccgcgtttaaccgcagccagcacgccgaccggaataccgactgccgtagcaaaaatcatcgcgcagacgccaagttccagcgtggcctggaagcgcggcacgaactcttcccaaaccgggatgcggcttttcattgaaatgcctagatcgccatgcataacgccccaaatgtaatggagatactgctgccacatcggtttatctaagccgagttcagccagcagctgcgcgtgacgctctggggagatcccacgttcgcccgccatgatcatcaccggatcgcccgggatcatgtggacaaaggcaaatgtgagaagggtaataccgataaacgtggggatgacgagtcccaaacgtcggagaataaactgcaacataacccggattctctatagtgacccgcagcctggaactgcgtgtctgtattgctcacaaatcaattcccgcccttatcggacagggaatgaagtattgctgccggatggcgctgcacgcagaggcacagcgccaccgggtatacagattgttgacaaagtgcgctttgtttatgccggatgcgcggttaacgccttatccggcctacaaaatcgtgcaaattcaatacattgcagaattttcgtaggcctgataagcggagcgcatcaggcatttttgcctttgccatcagtcttgtatggcttttaattattcgatagagacgttttcgaagtgatgtttgcctaatggatcaaccacatagcctttaacttctttacgtaccggttcaaacacggtggagtgagcgatgatcagtgccggagcctgatcgtgcatcaccacctgcgcttgtttgtacagttcaacgcgtttattgtggtcgtcggtagcacgcgccggttgaatcagatcttcaaacggtttgtagcaccattttgagtagttggagccttgttcagaggcggcgcagctgaacagggtggcgaagaagttatccggatccccgttatcgccagtccagcccatcattaccgtctggtgctcgccatctttcgcacgcttgaggtactcaccccattcgtaggtgacaattttggcctgcacgccgactttcgcccagtctgcctgaatcatctccgccatgcggcgagcgttcgggttatacggacgttgtaccggcatcgcccacaggtcgatggagaaacctttttccagacccgcttctttcagcaaggctttcgctttttcaggatcgtaggtgtagtcctgaacgtcgtcgttatagccccacatggttggcgggatcaggtttttcgctgatacgcccgcgccctgataaaccgctttgatgatcgcgtctttgttcaccgcgtaggtcagagcctggcgaactttcacgtcatcgagtggttttttctgcacgttatacgagagataaccgacgttcagccccggcatttccatcagattgatggatttatcctgcttcatgcgagcgatatctgccgggttcgggtacggcatcacctggcattcattcttctgcaatttcgcgtaacgcacggaagcgtcaggggtaatagagaaaaccagcgtatcgatctgcggtttggtgccccagtagccatcaaacgctttgtagcggatacgggaatctttttgatactgctgtaactggaacggaccggttccgattgggttgaggtccagtttttccggtgtaccggctttcatcatcgcatcagcatattcttttgacagaatagaggcgaagtccattgccaggtcagcgaggaacggcgcttccgggcgagtcagcacaaactgaacggtgttgtcgtccacctttttcacttcactgatcagctctggcaagcccatgccttcgaagtattcgtagctgccgccagaaactttatggtacgggttttgcgcgtttttctgacgatcgaacgagaacaccacatcatcggcgttcagttcacgcgtcggtttgaattctttattgtcgtgccacttcacacctttacgcagatggaaggtataggttttaccgtcttcgctgacttcccacttttcagcgaggcccgggatcacttcggtggtgccgattttaaattcaaccagacggttataaagcgggacggaagaggcgtcataggtggtgccggaggtaaacagctgcgggttaaacccttccggagatccttctgagcaataaaccagagttttagcctgaacacttgctgcgacggtcatagccaccaggctgagaccaagcttcagcatccctgactttttcaaggaaatacgcattattctgctccaattgtgatgtttgttgttttaaccctttgcagtgggttgtcgctgcctgaccttttttgttttttgcccggtcgggtcaacgttatgaggtggggatgccgtactaattaacatcagtgtaacagtgcggatcctccataaaatgcccctcgtgacctacaatctgtcaacagaatgtgaaaacgtcaatacagccaaccgggatttacaccaacggtgagaatccacacacaaagattaaaaaaacttcaaacagctatttgcagcagagaaatttgtgctactccaacatgaccagaacaatcagcttaatatttagcaacatttggtgattaagttttatgcatttaatgaaaaaaatctgaggaaaaggtggatatctgagcgattaataccatgaacgctaaaacgcacagcggaaaatgccagggccagccataagtaacgcaaaaaaagatttaagcaaatataaaaaaagacaatggtttctgtcacaaatccgttaatggatagtgagatatggggcgcaaatttggcagggaaatgtgtgtcgtgtaggtcgaataaggcggtcgcgccgcatccgacaatggccggcacatttgcctgatgcgacgctgacgcgtcttatcaggcctacgtcgagtcgaacctccctgcccccggaggttctcatcctcatgagctgcagatgcaaaaaagcctgctcgttgagcaggcttttcgaatttggtcggtgatagaggattactcgccacttcgtggctcgccctgcgggccgttgctggcgcaacgttctctcgcttcgctcgagtcgaacctccctgcccccggaggttctcatcctcatgagctgcagatgcaaaaaagcctgctcgttgagcaggcttttcgaatttggtcggtgatagaggattcgaacctccgaccccttcgtcccgaacgaagtgcgctaccaggctgcgccaatcaccgaatgcggggcgcatcttactgcgcagatacgccctcgtcaatcccttaatagcaaaatgccttttgatcggcgagaaagtcagcaggccgcttagttagccgctgcctcttttgcctgcgggatgtgacaccagttgttgttttcgttaattccaccatccggtgaagtatagccaagacaacccatgatggtatcgtacagctctacgtgacggcgtggcactttcatgtcggcttcttttttcagctgcgcaaacgcctgcgcattggccggattttccagatatttatctgacatccagaccatcatcggtacgcggaactgctccggcggtgccagttcacgcggcgtgccgtgcaggtgctcgcgttcattaattgactcaccgtggtcagctgcgtagaacacaatcgctttcttatcgcgaacctgatcaatcacgctggagataaagtgatccacataggtcaccgagttgtcataggagttgatcatctgcgctttggtacagccgctatcaacaccaatacattccggcttccactgcgcgaagctacgcggataacgctgggtgtagttaaaatgcgaacctttggtatgcagaatgatcagatgcttaccatccgggttgcgccctagcgattgctgcatttcgtctaccagcaacatatcatctaccggcttgccacgattacgtggctccgcaccaatctgctcacgataagcaatgttgtccgccatcgtgttgctgtagaaccacatttcgctctgcatagcgtagaggtcagaactgaatcctaactgcttcagaaccgcgaaaatgttctgttcttttaatgtgcgctgcggattatcttccgcgcccccctgacgtacaaacatgcaacgcagtgagagtttggttgcggtatcacaggagtaaccacggaacgccgccagatttttctcctgggccagtttcggcgtggtattacgctcatagccgaaaatacccatatggtcccaacgcgtggtttcaccgatgataaacacgacataagtgtcatcaacgttttgcggtgcctgataagtgaatttcttcgccggattaagcaatgaattattatcggaagattcatcgacccgcgcccaggcatacagccccaacgcagaaagccagtttgatggcagataagagttcgctacgacaccgccataactcggcaaatcaacgccggtcgccctctccactttcttctgctggatatccagcaaacgaatcggtgcccaaaccataatacccgccagtacgacgaccgccaggctgcgaatacgctgccctggggttcgcagttgtcggagcaaggtgtagcgacagcggttattccagataaggataagaggcaatgcactaacggcgattaaccagagaataaagttcagaccaacaacttcttttgacaggtcgatatcggtggtcatgacggaagcgatgatgccataaccaatgaccacattaaggaaggtcatgtaatagctggcacctgcggaaaagagcaccaccagcgatgccagaatacgccagctgcggcggccaaacagcgaaagaagacgtagtaaaaagaaggtcaccagtacggtggcggccagttcaacaacagcagaaatgcctttccagacggtaaaatcgtgcgcatagctgccgaagcggcggtaaaaaaccgcgccattcataaaaaggccaatatagattgcaagcaaaaagctcagcttctgctgtgtaatcgatttgatgtatctcatgcaaacaaaccctggacaaacaggtgataacaccctgcttagtggcttttcaggcccggcagggaaaaagtgcggaggtagtcagataagtaaaatctacacgcgcgaataagtagaccacagcaaagggaaaaagtgtggggaaagagtgtgcatgaagcacaaatttacaaaaatgcaagtttgaaaagagactttagcgttacaaaaagcagtaaaaagggccagttaattggcccaaattttacgagtcattgtttatacatttcgttgatgcgtttgatgcacacggaagctgaagcccagtagctcgcggctgagcattaaagggagccatgcgcctcacgcaacattttctgctctggctgacgaatcgtcgtagaaagcgccaatgacagaatcagcagggcgaaaatcacgtagaaggtcacatagaagccgccaaacagtgaggcgataatcgaaccacaaatgctaccgataccgaaaccgagataaatcacaccgtagtttttcgccaggttattgaggccaaagaactcactgaccagtgacggaaagacggtaatagtgccgccaaagttaaatgccacgcaggcaatcgctgcaaagaacgtcactgcattcaatggtgcaaacagcagggccgccatacccaccagcgatatcacctgaccaatggtaataacacggatacgggcgattttgtcagacagaatacccagcaccagacgacctgaaaggttggcgatggaaataacagtgactgcattggctgcggaaaccacatcaaggtgtgccagactttgggcgatatctttcgctaccccaatcacgtacaggccgctcatgcaggcggtcaggaacattaccgctaacatccagtactgcggtttacgcatcgactctgccagcgtgtaatctttctccaccacaccattgctggttttcacttcctgttttggtgcgtctttcattaacgttgcgccgaaaacaatcatcaacagcgcaatcgctccccaaatcacaaaggttttttccagaccgaccgtttccagcagctgcgtgtcgataaatttgaaacccaggctacccagaccataagaaccgatagcgaacgcggagatcagacctttacgctccgggaaccacttcacacagttagagagcgtcagcagataacccgcgccatctgccagtcccaccagcacaccggcgcttaaccacagcatcatcaggttgtcagaatgcgctgtcaggaagaagcctaatcccagcaaaatgccggaagccatggtgacgcgtttaacgccaaaacgttcctgtaatttgcccgcaacagaagacgaaattgccagccccagacttaacaagccgaaagagaaagcgacctggcttaccggcgcatccagcttggcggaaagcgcgccattaaacaggctccaggtataaaccgaccccagcgcaaactgggtaatgatagtaccgatgagtgtcagccagcgggtacgctgataatttgaaggtgtcatggcagtattcctgcagtaataaaaaggaaaaatctctgccgacaaccataacgaagtgcactttatgcctggggaaaaacggcatgaaatgccatcagaacggaatgaaatgccttagttcaggaatgaatgacgcgacaattattcaccaaatttattatttggtaagttagcacccactatcgccacaactattgttatttaatggtttcaattgtgactgttacgttaaaatctggcgctaacccccatcgtatacagatagtcgctattattagtggtattttctgcctgagttagcgcggcataggcggcaatattttgattgagcaacatatcagcgcctacggtgacatccagccagttgccgttctggtttgtcgccgtcatccggctcaggcctgattgcgccttccagatattctcgccaaattgctggttatagctgatttgcgcccagggtcggagatcgccaagccgggagtcaacacgccagcctaaggtactcacgctggcatgccataacggatcggtcagcgtggtagtactgtcgccaaactcgttatacatcgaggtggttgtgccatcgtaatgtaatgccgcgaccgggccggttgtaacctgttcatataaaggaaaattccagcccatactcatactgctggtcacatccacaggggtttcttccgccagattgacttccagtcccagcgccctttggctactttgaatacgttgcgacaaaatatcgttgtaatcaggttgatgatcactatcccaggtgtaacgctctgtggaaagtccgggttgcgtatcaacgatatattcttgttgccaggcgtaagctgtgttgagaaaaaaggcactgattaccacgctcgccagcaggcttagctgccagcgaccaccgcttttttttatgatcattaacacgactccagggaagagccgaattcggcaatattattgtcattgtatgaaggatatcgggcatagtagccctgtattaaatattgactttttcaccgatgcgtcaagaaaagcggctgaaatttttacgatcgggtacatagcgagggaaagtatggaacgttgcggctgggtgagtcaggacccgctttatattgcctaccatgataatgagtggggcgtgcctgaaactgacagtaaaaaactgttcgaaatgatctgccttgaagggcagcaggctggattatcgtggatcaccgtcctcaaaaaacgcgaaaactatcgcgcctgctttcatcagttcgatccggtgaaggtcgcagcaatgcaggaagaggatgtcgaaagactggtacaggacgccgggattatccgccatcgagggaaaattcaggcaattattggtaatgcgcgggcgtacctgcaaatggaacagaacggcgaaccgtttgtcgactttgtctggtcgtttgtaaatcatcagccacaggtgacacaagccacaacgttgagcgaaattcccacatctacgtccgcctccgacgccctatctaaggcactgaaaaaacgtggttttaagtttgtcggcaccacaatctgttactcctttatgcaggcatgtgggctggtgaatgatcatgtggttggctgctgttgctatccgggaaataaaccatgattcgggaagcgcaacgttcagaactccccgcgatcctcgaactgtggctggaaagtacaacctgggggcatccctttataaaagcgaattactggcgtgactgcattccgctggtgcgggatgcctatcttgccaacgcgcaaaactgggtctgggaagaagacggtaagcttctcggttttgtcagcattatggaaggccgatttctggcagcgatgtttgtcgcaccgaaggccgtcaggcgcggtattggtaaggcgctgatgcagtatgtgcagcagcgccatccccacctgatgctggaggtttatcaaaaaaatcaaccggcgataaatttttaccaggcacagggttttcacattgtcgattgcgcatggcaggatgaaacccaactacccacatggattatgagctggccggtggttcaaacgctgtaagtgtcagttccggaccgttgtatttttccagccatgccagcgccgtattacccgcacagccattccccagccgcgagctggggagatctttggtcagcacgttcactgcgccgtttttacaaataccgtcagcggttaaatccagatccggccatgccccttcgtgaatgcaaatcacgccaggtttaattccctcgctaatgaccgctccggcaagaatttgcccgcgtgcgttccacaaccgaacagtatcgccatcttgtatgccgcgctcctgggcatcgtcaggatgaatggtgacaggctcacgatttgccaccgcgtacaattcgcgcagagaactgtaattcagctggctgtgcaggcggtgcgccggatgggcagaaagtacctgcaactgttctggttcggcattgccctgccattcgtccggctccagccacattggatgcccagggcaatccgggtaaccgtaatcggcaatacgctgtgagaagatttcaatcttgccgctggcggtttttaacggatgcgccagcggatcgcggcaaaaatcagcgaagcgaataaaccgctcgctgtccgggttttccggcatctcaattaactggttggcttgccagaactcagcaaatggcggcaattcaacctgctggcttgccccgcgctgtcgggcaacgttataaaacgtttccagccattgcagctcactttttccttccgtaaaacgtgcataaccgcccttctcccagcgttcacttaactcggcaaaaacatcaaaatcattacgcgcttcatagcgtggcggcaccacttgcttcatcggcaccagatgctgattactgtaatcaccggtcatggtgagatcattacgctcaaaagaggtagtcgcaggcagaacgatatccgcgtgttttgccgccgccgtccagaagcattcagagatcaccaccagctccggtttttgccaggcacggatcaggcgattggtatcctgatgatgagtaaagttggcaccgcccgcccaccagataaaacgaatatccgggaaatgtcggttcataccgttgtgttgatatgcgccaccagggttttccagtgcttcaacaatgcgggcaacagggattttatccaccgcatcgcagccacccggcaagctgccctgcatggaagagagcaccgcagaacgccgcgtggggttaccaccattggcaaaatggtaagaaagaccaaaaccgccgccgggtgtgccgatttgccccaacattgctgccagcgtgacgatcatccagtgtttttgctcaccaaactgttggcgctgcattccccagcctgccatcagcatggtggtattttggtggaaaatagccgccagctcgcggattttcgctgcgccaacaccacaaatctctgctgcccattcggcggttttcgctattccgtcactctcgcccagcaaataagaggcgaagacggcataacctgtggtgcaacgcgccagaaacgcttcgtcgtgccaaccattttccaccagcgtatgggcgatccccagcatcagcgcaacatcggtgcccatgtgcggtgccacccactccattttatcgccaaagaaatcgacggtttccgatcgcattggatcaatgcagatcagctttttcccgctgtcacgcagtgcagaaaagtaagaaagcccctgctcatcggatgcattccacgcaattttcagcgtattgagtgggttagcactccacagcaccacgacatcgctatgttccagcaccagcggccaactggtctgctgttgataaacttcactaccacccacgacatacggcatgatcgcctgtgccgcgccggtcgaataatcccccagatgcccggtataaccgcctgccagcgccatatagcgttgtaataatgtcgaggccttatgcagcacgccgtttgaacgccagccgtaggaaccagcaaaaatcgatgccggaccataagcctcacgaatgcgtttatgttgttggtgaataagatccagcgcctcatcccaactcacgcgaacaaattcatcctgcccacgaatgccttgcgggttttccggtgacgcaagaaagccttttcgcaccattggaaatcgtacccgcgtattgctgtgaacctggtcgcgaaccgcgctctgcaaggagttttccattcctgtggctaacgcgccacgcgagctaaacacggtttcgccgtcggtttcaaccagcatgggcccccaatgggcggcagtcagaacggaatatcgtgaggatgagttggccaaaccgaagactcctgaaaggttagatgtattgagcagttaaatattacttacaaatttccgagtattcccaggaataatcttcatgttcacgcggcataatctcccgccacggaacccgtggcaaagaataaaaaggttattaaggattaacaatgaagaaacgtgtttatcttattgccgccgtagtgagtggcgctctggcggtatctggctgcacaactaacccttacaccggcgaacgcgaagcaggtaaatctgctatcggcgcaggtctgggctctctcgtgggcgcgggtattggtgcgctctcttcttcgaagaaagatcgcggtaaaggcgcgctgattggcgcagcagcaggcgcagctctgggcggcggcgttggttattacatggatgtgcaggaagcgaacgtgcgcgacaaaatgcgcggcactggtgttagcgtaacccgcagcggggataacattatcctcaatatgccgaacaatgtgaccttcgacagcagcagcgcgaccctgaaaccggcgggcgctaacaccctgaccggcgtggcaatggtactgaaagagtatccgaaaacggcggttaacgtgattggttataccgacagcacgggtggtcacgacctgaacatgcgtctctcccagcaacgtgcggattccgttgccagcgcgttgatcacccagggcgtggacgccagccgcatccgtactcagggccttggcccggctaacccaatcgccagcaacagcaccgcagaaggtaaggcgcaaaaccgccgtgtagaaattaccttaagcccgctgtaatccctttcatgccaggtgatgcagaaatcacctggcattcttcagttttccttcatcatatttcaggctaaggtgatcgccttatcagtgaatggagagaagcatgaagccgtccgttatcctctacaaagccttacctgatgatttactgcaacgcctgcaagagcatttcaccgttcaccaggtggcaaacctcagcccacaaaccgtcgaacaaaatgcagcaatttttgccgaagctgaaggtttactgggttcaaacgagaatgtaaatgccgcattgctggaaaaaatgccgaaactgcgtgccacatcaacgatctccgtcggctatgacaattttgatgtcgatgcgcttaccgcccgaaaaattctgctgatgcacacgccaaccgtattaacagaaaccgtcgccgatacgctgatggcgctggtgttgtctaccgctcgtcgggttgtggaggtagcagaacgggtaaaagcaggcgaatggaccgcgagcataggcccggactggtacggcactgacgttcaccataaaacactgggcattgtcgggatgggacggatcggcatggcgctggcacaacgtgcgcactttggcttcaacatgcccatcctctataacgcgcgccgccaccataaagaagcagaagaacgcttcaacgcccgctactgcgatttggatactctgttacaagagtcagatttcgtttgcctgatcctgccgttaactgatgagacgcatcatctgtttggcgcagaacaattcgccaaaatgaaatcctccgccattttcattaatgccggacgtggcccggtggttgacgaaaatgcactgatcgcagcattgcagaaaggcgaaattcacgctgccgggctggatgtcttcgaacaagagccactgtccgtagattcgccgttgctctcaatggccaacgtcgtcgcagtaccgcatattggatctgccacccatgagacgcgttatggcatggccgcctgtgccgtggataatttgattgatgcgttacaaggaaaggttgagaagaactgtgtgaatccgcacgtcgcggactaagccgcgactgcgtagagtaaagcccgataatcgctcgggcttttactctttattgggttgcagtaactgctgtagtccaggcctgattaaacgcctgatgctgtgccggtaatggcgcaatcagtttgttatattcacttgcctgctgtgaagtcgggaactggatgccatttgcgacaaagctcacctgagtaccttgctgagcaatgtagtctccaaccatcaccagttgttgcgtgaaagtttgtgccgccggaatcaacggttgcaatgcatcagctggcgtcgttaccactttggtgaatgcctgatcaaagaccggtttcaaatcatcgctctgttttagcgcagagtgcgcagcatcggcctgcaacttcgcattttgcagttgttgcgccagcacacccagcgaaccgttcatttcacgcagcggaccgctttgcgtaacgtaatcctgcggtacgcgaattgcgttaacgctgtctacaaccgggcgcagaccggaatccatcgcctgattcacctgctgagaataaccatacagaatcgcgtaatcagagacaaaaggaccaaactgttttttctgatcggcagtcagggttggtagacgttcaccgctacgcatcactgtattctgcaggaagtcgataaacgctttacgctgatcgccttctttatcaaaacacccactcaggctaactaccattaataacgccgcaagaggcgcaaaccagcgagagcaggactttcctgtcgccattttcttactcctttcacccaaaaaaagcgcacaacgacacacgcgtgtctgacgtgacaaggatagtccaggacaggcttgcaggataccctttctacgtaatcttcctggtaaaatcatggagaaaatgaaacaaggttaatttgttgtttcattgttaaaaaatgatagtgccgttgccttttttgtagccagagatttacgccttcgcagaaggttagattttcgaaatctttacaaaacaggagtggtaagagatatatcggcatttatcagatcgttaggtggctataagtcacgctaaatgacaggctgaatcgaatcatagccagagcatgccctgacttcaccccgctgtgtctgcttttcccgactattcttaatgagcttcgatgcaattcacgatcccgcagtgtgatttgaggagttttcaatggaatataaagatccaatgcatgagctgttgagcagcctggaacagattgtttttaaagatgaaacgcagaaaattaccctgacgcacagaacaacgtcctgtaccgaaattgagcagttacgaaaagggacaggattaaaaatcgatgatttcgcccgggttttgggcgtatcagtcgccatggtaaaggaatgggaatccagacgcgtgaagccttcaagtgccgaactaaaattgatgcgtttgattcaagccaacccggcattaagtaagcagttgatggaatagacttttatccactttattgctgtttacggtcctgatgacaggaccgttttccaaccgattaatcataaatatgaaaaataattgttgcatcacccgccaatgcgtggcttaatgcacatcaacggtttgacgtacagaccattaaagcagtgtagtaaggcaagtcccttcaagagttatcgttgatacccctcgtagtgcacattcctttaacgcttcaaaatctgtaaagcacgccatatcgccgaaaggcacacttaattattaaaggtaatacactatgtccggtaaaatgactggtatcgtaaaatggttcaacgctgacaaaggcttcggcttcatcactcctgacgatggctctaaagatgtgttcgtacacttctctgctatccagaacgatggttacaaatctctggacgaaggtcagaaagtgtccttcaccatcgaaagcggcgctaaaggcccggcagctggtaacgtaaccagcctgtaatctctgcttaaaagcacagaatctaagatccctgccatttggcggggatttttttatttgttttcaggaaataaataatcgatcgcgtaataaaatctattattatttttgtgaagaataaatttgggtgcaatgagaatgcgcaacgccgtaagtaaggcgggaataatttcccgccgaagactcttactctttcaatttgcaggctaaaaacgccgccagctcataactctcctgtttaatatgcaattcacacagtgaatctcttatcatccaggtgaaaaataaaagcgtgaaacaaatcactattaaagaaagtaatctatatttctgcggcattcccagcctcctgtgttgatttccaacgagtatgtactgcacccattttgttggacgatgaaatggaatagcccctaatatgtcaaagccaaaatacccttttgaaaagcgccttgaagtcgtgaatcactacttcacaactgatgatggttacaggatcatctcggcacgttttggtgtcccccgaacccaggtcaggacatgggttgccctctatgaaaaacatggagaaaaaggtttaattcccaaacctaaaggcgttagtgctgatccagagttgcgtattaaggtcgtgaaagctgtgatcgagcagcacatgtcccttaatcaggctgctgctcactttatgcttgctggtagtggttctgtagccaggtggctgaaggtctatgaagagcgcggagaagctggtttacgcgcgctcaagattggcaccaaaagaaacattgcaatatcagttgatccagaaaaagcggcatcagcattggagctgtcaaaagaccgacgcattgaggatcttgaaaggcaagttcgatttcttgaaacgcggcttatgtatctaaaaaagctgaaagccttagctcatcccacgaaaaagtgaaagtactcaacgagctaaggcagttttatcctcttgatgagcttctcagggctgcggagataccgcgcagtacgttttattatcatctaaaggctctcagcaagcctgacaagtatgcggacgttaaaaagcgtattagtgagatttatcacgagaatagaggccgatacggataccgtagggtaacgctgtctcttcatcgagaagggaaacagattaaccataaagctgttcagcgcctgatgggaaccctctcacttaaagcagcgattaaggtcaagcgataccgctcttacagaggagaggtagggcaaaccgcccctaatgttctccaaagagatttcaaggctacgcggccaaacgagaagtgggttaccgatgttactgaatttgcagtcaatgggcgcaagctgtatttgtctccagtaatagatctcttcaacaacgaagttatttcttacagcctttcggaaagaccagtgatgaacatggttgagaatatgctcgatcaggcattcaaaaagcttaatcctcacgagcatcctgttctgcactctgaccagggatggcagtatcgtatgagaagatatcaaaatatccttaaagaacatggtattaaacaaagcatgtccagaaaaggcaattgtctggataatgctgtggtggagtgtttctttggaaccttaaagtcggagtgtttttatcttgatgagttcagtaatataagcgaactgaaggatgctgttacggaatatattgaatactacaacagcagaagaattagcctgaaattaaaaggtctgactccaattgaatatcggaatcagacctatatgcctcgtgtttaactgtccaactttttggggtcagtacaaactttgatttatagtcaggtggggcttttctctgtctgcctttcggtgaatacctgagacaaacagtctcaagcacccgtggctattctagcttaataagtttgtttcttctccttgatataatcctaaaaaaatctcataaaattaatatatgagataatctttattcagcagaagattattaaaggttgctgtattatttagcgataaaaaaagcctgccagatggcaggctatttaataacggcgttattattgcaacagcgaaatatccgcaacgcgcaggaacagttcgcgcagtttctccagcatggtcagacggttgatacgcaattctttgtcatcaaccatgaccatcactttatcgaagaaagcatcaaccggttcacgcagctcagccagttcgaccagcgcatcctggtaacgaccttccgtaaagtacggctccagcttgtcacgtagcaccacaacctgcatcgccagtttaatttcttccggctctttcagggtagaggcattcacgcggtcgctcagcacttcgtcagatttcgccagaatgttagatacacgtttgttcgccgccgccagtgcagcagctgcatccagggtacggaaatgcgataccgctttcatacgggcatcgaaatcagccggacgagtcggacgacgcgccagtaccgcctggatggtgtcaacggtataaccttcgtcctgataccaggcgcggaagcgaccgagcataaagtcgataacatcatcaactacgttggcattagtcagcttatcgccatacagacgcaccgcttcttcggtcagcgtttgcagatcaaggttgaggttcttctcaacgataattcgcagcacgccaagcgcggcacgacgcagcgcaaacgggtctttgtcgcctttcggatgctgaccgataccgaagatacccgccagggtatccatcttgtcagcaatcgccagcgcacaagctactgggttggacggcaggtcatcaccagcaaaacgcggctgatactgctcattcagcgccaccgcgacatcttccgcttcgccatcgtgacgcgcatagtgcatccccataacgccctgggtgtcggtgaactcgaagaccatgttggtcatcaggtcgcacttagacagcagacccgcacgggtagcgtggttaacgtcagcgccaatctgttcagcaatccagccagccagcgcctggatgcggtcagttttgtcgcgcagcgtccccaactgttgctggaacaacacggtttgcaggcgcggcaggttatcttcaagacgttttttacggtcggtgttgaagaagaactcggcatccgccagacgcggacgaacgactttctcgttaccggagataatctgctgcggatctttcgattcgatgttggcaacgaagataaagttcggcagcagtttgccgtcgttcgcatacaccgggaagtatttctggtcacctttcatggtgtaaaccagcgcttcagccggcaccgcgaggaatttctcttcgaattttgcggtcagaacgaccggccactccaccagcgaagccacttcttccagcaggctttcgcttaagtcagcgttaccgccaatcttacgcgctgcttcttcggcatcggctttaatcttcgccttacgttcttcgtaatcggcgatgactttcccacgctcacgcagaatttccggatactgatcggcgttatcgatggtgaattccggctcgcccataaagcggtggccgcgaatcacgcgatcggactgaatgcccagaatggttgccggaatgactttgtcgcccagcagcagggtcacggtgtgcaccggacgcacgaagtgcacgtcgcttgcgccccaacgcatcagtttcgggatcggcagtttcgccagagaagtcgcaaccatattcggcagcagtgcttcggtgctttcgcccttcacatgggcgcgatacagcagccattcgcctttatcggtagtcagacgctcagcctggtcaacggtaataccgcaaccacgcgcccaaccttctgccgctttgctcggtttgccttcagcgtcgaacgcctgggcaatcgccgggccgcgtttttcgatttcacgatccggttgcgcttccgccaggttagctactttcagcgccagacgacgcggagcagcaaaccattgaacggtgccgtgtgcgaggccagcgttatccagctccgcagtaaagttcgcagcaaaggactcagccaggctgcgcagtgcttttggtggcagctcttcagtgccgatttccaccagaaaagttttctcagacatagccgcctcttacttatctttgttgcacatcgggaagccgagggcttcacgggaagcgtagtatgcttctgccactgctttggtcagggtgcgaatgcgcagaatgtagcgctgacgctcggtgacggagatggctttacgcgcatccagcaggttgaagctgtgggcggctttcagaatacgctcgtaggctggcagcggcagcggattttccagcgccagcagctgctgcgcttctttctcgtactgctcgaagcaggtgaacaggaagtccacatccgcgtattcgaagttgtaagtggactgctccacttcgttctgatggaacacgtcgccgtaggtggttttacccagcgggccgtcgctccagaccaggtcgtaaacgctgtctacgccctgaatgtacatggccagacgttccagaccgtaggtgatctcgccggtaaccggtttacactccagaccaccaacctgctggaagtaagtgaactgcgtcacttccatgccgttcagccacacttcccagcccagtccccaggcacccagcgtcgggttttcccagttatcttccacgaaacggatgtcgtgaatagtcgggtccatgcccagctctttcagagaaccgaggtacagctcctgaatattgtccggcgatggcttaatgaccacctggaactgatagtagtgctgtaaacggttggggttttcgccgtagcgaccatcggtcgggcgacgagaaggctgaacataagcagccgccatcggttctggccccagctcgcgcagacaggtcattgggtgagaggttcccgcgccgacttccatgtccaatggttgaacaatggtgcagccctggcgagcccagtaatcctgtaaggtcaggatcaagccctggaaggtcctggtatcaaacttttgcatattatttcgtgctggatacgtgtggatttaaaggaagggatcagtatacccgctggatggaagatatacagtacgaaacgggaaaaagcagggcttaacgcatggaaagatgcaaaaaatggccatccgcgtcaaaagaacagacaaactgctctttacggaaggtataaccgcgcatttcatagcttccctggaactgttcgaaggcggtgacgtcgattttttgctcgccggtgttataacgttttgccgcctgatccttgcataacgcttccatattcaacgaacgcagaggatcaacctttacccgttgtgctttctgcacgggtgacggtatagaacaacccactagcaccataagcgccattgccggaaagaaagcgttcatcatcattaaattaccgtctggtttgcaggtgagtcttattatttatatcggtatagtggctgatatcttacgaatttccttaagcctctataagctgtagtgataaaactcagattattccagtgcgccaaccaaatgatttatcggtcagactttttttaaccagatacagagacacagatgcagcccaaaatttactggattgataacctgcgagggatagcgtgtttaatggtggtgatgattcacaccactacctggtatgtgaccaatgctcatagtgttagccccgtcacatgggatatcgccaatgttctgaattctgcctctcgtgtcagcgtgccgctatttttcatgatttccggctatctcttttttggcgaacgcagcgcccagccgcgccatttcttgcgtatcggcttatgtctgattttttatagcgcaatcgcactgctctacattgcgctgtttacctccatcaatatggagttagcgctgaaaaacctgctgcaaaagccagtgttttaccacttgtggtttttcttcgcgattgcggtgatttatctggtttcaccgctgattcaggtgaagaacgtcggcggaaaaatgttgctggtgctaatggcggtgattggcattatcgctaacccaaacacagtgccgcagaaaattgacggttttgaatggctgccaattaacttatatatcaatggcgatactttttactacattctgtatggcatgttgggccgcgctatagggatgatggacacacagcataaagcactgtcgtgggtgagcgccgcgctgtttgcgacgggggtttttattatctctcgcgggacattatatgaattgcagtggcgcggaaattttgccgatacctggtatctttactgtgggccgatggtttttatctgcgcaatcgcgctattgactctggttaaaaacacgctggatacgcgtaccattcgcggacttggcttaatctcccgccattcattgggtatatacggattccacgccttgattatccatgcgctgcgcacccggggaattgagcttaaaaattggccaatactggatattatttggatcttttgcgcgacgttggcagcgagtttgttactttctatgctggtacaacgaatcgacagaaacagattagtgagttaagtaaaagcccggtcacattggactgaccgggcttacgtgagttattcgctgtattcttcctgggtaacctgtgtttcttttggtgggtttattccggcatcacgaatatttttctgcaccgctactgcaccaaacaagcttaagaagaaagccagtccataaaaacctttttcgctgagtaataatgtcgcattccacagacctaccatcagtaatgcaacagagataataaagacagtcaggcaggtcatataataaatggaagtggtcggtatgccttcatacttgtcccgaacggtcttttgataagacgccgcagaaaacagtcctaataccagtacggcaaaataatatcctttttcatttaactgcatctctgcattccatagccctaacagataggtaacgataccaccaacgagagctatccatgacacaatactaaaggccggtgaataggttgatattttgttgtccatcacagtattcctttcattcctgaatatgtaagagctttatgttgctcatgccgagcgaaacaaacgcatttgaccaaacaagcagacaaaaaaggcgatgggatagatcaccatttcataagtattgataggtgcgtttaaaacaccgataaacaagagaccgatagtgattaacgcaactaactggcagatatgggtaaaaaaatcatccagttgcccgagtttttctgcgcgaagatatgcatagttgccaaaagttgctgtcattaacacgccaagaaaatagccttttccacttaacaatgggcatgagatccatagcccaaccagataaaccagcgccccgacaacaaataatagttttgccacagtctttgaggttttcataacgatctccatatctaccagcgatacattacgagtaaccaacgaaagacaaaactgaaaaatgccattaacaaatgattttcagaataaattcatactaaatattaattaattactgagatatatagatgtgaattatcccccacccggtcaggcaggggataacgtttacgccattaatggcagaagttgctgatagaggcgacggaacgtttctcgtcgtggctgataagcggcataacgctgcgcatctggtagatgcgactgttctaacggtagttgcggcaacaattcaatgagcgatttctctggattcgccgcgatctgcgccagccttgctgcgcccagtgctggccccacatccccccccgtacggtaatcgagctgctgaccgctgatatccgccagcatctgacgccagtactcactacgcgccccgcccccaatcaacgtaacactttgcggtttaataccgcaggcatgcacgacatccatgccatctgccagcgcataacccacgccttccagcactgctcgcgccagttcattggggccatgttgatgagtcaaaccaaagaaaacccccttcgcctggggattattgtgtggcgtacgctcgccggaaagataaggcagaaaccaaactggctcggcactttcatcagcctgttgagctgcagcgattaaagctgggacattgctcaggccggttaatttcgcggcccaatccagacacgacgctgcactcagcatcacagacattaaatgccaacgttgcggtagcgcatggcaaaagctatgtacggcgctttctggcttgcttaagaacccttcgctgacagcaaaatagacccccgacgtccccagcgataacattgcctgattagcatcaaccattcccacaccaactgcaccagctgcattgtcgccaccgcctgcgacaactggcaccgtcgccataccccacgctttcgcaacttcaggtaacaaagcaccagtaatttcgctgccttcgtataatgcgggcatctggtcacgagataagtcgcaagcctgcagcatgacgtcactccagtcacgctttgcgacatccagccacatggtgccagctgcgtcagacatatcgctggcaaactcccccgtcatacgcagacgcaagtaatctttcggtaataatactttgtcgatttgacggaatatctccggctcatgccgctgaacccatagcaatttaggcgcagtaaatccgggcatcatcaggttgccggtaatcacccgcgattgcggaactcgcgcttccagcaaagtgcactcttgcgcacagcgcccgtcgttccacaaaatggcagggcgtaacacccgttgctgagcatccagcaaggttgctccgtgcatctggccggcaatacccaatgctttaacgtcctgcagagaatgctgatcgcccagagctttcattgcgcgatcagttgcctgccaccactgttccgggtcttgttccgaccagagtggatgcgggcgcgaaacggtcagcttttccgtttgcgcagcaaccacctcaccctgctcgttgagcaaaataacttttacgcccgaggtgccaagatctatcccgatatacatatcgatcgttccttaaaaaaatgcccggtatcgctaccgataaccgggccaacggactgcacagttagccgttatttgtcgaacagataatggtttaccagattttccagttgttcctggcgaccactctgatgcaccggagacaaatgatgttcctgagcatatttggctaaatctgccagtgacatttggcctttcaggatttgctggcccaattcgctattccagccggaataacgctgcgcgatgcgtttatccagctcgccatcttcaatcatgcgcgctgcaattttcagcgccagtgccatcgtatccatcgcgccgatatgaccgtaaaacagatcatatttatcagtactttgacgacgtactttggcatcgaagttcagaccaccggtggtgaaaccgcctgctttgagaatttcatacatcaccagcgcattctcttccacactgttcgggaactggtcggtgtcccagcccagttgcgcatcgccacggttggcgtcgacagaaccgaacaggccaagcgcaatggcggtggctatttcatgatggaaagagtgacctgccagcgtcgcgtggttagcttcaatgttcagtttaatctctttttccagaccaaactgtttcaggaagccatagaccgtcgcggcatcgtaatcatattgatgtttggtcggttcttgcggtttcggttcgataagcaacgtgccctggaaaccgattttatgtttatgctcaaccaccatctgcataaagcggcccagttgttcacgctcctgacgcaagtcggtatttaacagcgtttcgtaaccttcacgaccgccccacaggacatagttttcaccgcccaatttatgggttgcttccatcgctgtaacaacttgcgttgccgcccagctgaagacttcaggatctgggttcgtcgccgcacccgcgccgtagcgagggtttgtaaagcagttggccgttccccacagcagcttcacgccgctctcttcttgcttgcctgccaggacatcaaccatttgcgcaaaattattgatgtactcttttaacgacgcgccctcaggggaaacatccacatcgtggaagcaataaaatggcacatgtaacttgtggaaaaactcaaatgcgacatctgctttacgcttcgccaacgccagtgcctcaccaggctgctgccacggacgattaaacgcccccacaccaaacatatccgccccgttccagcagaaggtgtgccagtagcaggcggcaaaacgcaagtgctcttccatacgcttacccaacaccagttcgtcgggattgtagtgacggaatgctaacgggtttgaggattttgagccttcataacgaacgcgatcgagctggtcaaaataggcttgcatattgaactccataatcaggtaatgccgcgggtgatggatgatgtcgtaatattgggcactccctttcagttgctcaattatgttatttcacactgctattgagataattcacaagtgtgcgctcgctcgcaaaataaaatggaatgatgaaactgggtaattcctcgaagagaaaaatgcaataagtacaattgcgcaacaaaagtaagatctcggtcataaatcaagaaataaaccaaaaatcgtaatcgaaagataaaaatctgtaattgttttcccctgtttagttgctaaaaattggttacgtttatcgcggtgattgttacttattaaaactgtcctctaactacagaaggccctacaccatgaaaataaagaacattctactcaccctttgcacctcactcctgcttaccaacgttgctgcacacgccaaagaagtcaaaataggtatggcgattgatgatctccgtcttgaacgctggcaaaaagatcgagatatctttgtgaaaaaggcagaatctctcggcgcgaaagtatttgtacagtctgcaaatggcaatgaagaaacacaaatgtcgcagattgaaaacatgataaaccggggtgtcgatgttcttgtcattattccgtataacggtcaggtattaagtaacgttgtaaaagaagccaaacaagaaggcattaaagtattagcttacgaccgtatgattaacgatgcggatatcgatttttatatttctttcgataacgaaaaagtcggtgaactgcaggcaaaagccctggtcgatattgttccgcaaggtaattacttcctgatgggcggctcgccggtagataacaacgccaagctgttccgcgccggacaaatgaaagtgttaaaaccttacgttgattccggaaaaattaaagtcgttggtgaccaatgggttgatggctggttaccggaaaacgcattgaaaattatggaaaacgcgctaaccgccaataataacaaaattgatgctgtagttgcctcaaacgatgccaccgcaggtggggcaattcaggcattaagcgcgcaaggtttatcagggaaagtagcaatctccggccaggatgcggatctcgcaggtattaaacgtattgctgccggtacgcaaactatgacggtgtataaacctattacgttgttggcaaatactgccgcagaaattgccgttgagttgggcaatggtcaggaaccaaaagcagataccacactgaataatggcctgaaagatgtcccctcccgcctcctgacaccgatcgatgtgaataaaaacaacatcaaagatacggtaattaaagacggattccacaaagagagcgagctgtaagcgttacgccccagcgcggagcgggggcgtgatttctctccatgccgcgtgaatgaattggcttaggtggagtcgttatgccttatctacttgaaatgaagaacattaccaaaaccttcggcagtgtgaaggcgattgataacgtctgcttgcggttgaatgctggcgaaatcgtctcactttgtggggaaaatgggtctggtaaatcaacgctgatgaaagtgctgtgtggtatttatccccatggctcctacgaaggcgaaattatttttgcgggagaagagattcaggcgagtcacatccgcgataccgaacgcaaaggtatcgccatcattcatcaggaattggccctggtgaaagaattgaccgtgctggaaaatatcttcctgggtaacgaaataacccacaatggcattatggattatgacctgatgacgctacgctgtcagaagctgctcgcacaggtcagtttatccatttcacctgatacccgcgttggcgatttagggcttgggcaacaacaactggttgaaattgccaaggcacttaataaacaggtgcgcttgttaattctcgatgaaccgacagcctcattaactgagcaggaaacgtcgattttactggatattattcgcgatctacaacagcacggtatcgcctgtatttatatttcgcacaaactcaacgaagtcaaagcgatttccgatacgatttgcgttattcgcgacggacagcacattggtacgcgtgatgctgccggaatgagtgaagacgatattatcaccatgatggtcgggcgagagttaaccgcgctttaccctaatgaaccacataccaccggagatgaaatattacgtattgaacatctgacggcatggcatccggttaatcgtcatattaaacgagttaatgatgtctcgttttccctgaaacgtggcgaaatattgggtattgccggactcgttggtgccggacgtaccgagaccattcagtgcctgtttggtgtgtggcccggacaatgggaaggaaaaatttatattgatggcaaacaggtagatattcgtaactgtcagcaagccatcgcccaggggattgcgatggtccccgaagacagaaagcgcgacggcatcgttccggtaatggcggttggtaaaaatattaccctcgccgcactcaataaatttaccggtggcattagccagcttgatgacgcggcagagcaaaaatgtattctggaatcaatccagcaactcaaagttaaaacgtcgtcccccgaccttgctattggacgtttgagcggcggcaatcagcaaaaagcgatcctcgctcgctgtctgttacttaacccgcgcattctcattcttgatgaacccaccaggggtatcgatattggcgcgaaatacgagatctacaaattaattaaccaactcgtccagcagggtattgccgttattgtcatctcttccgaattacctgaagtgctcggccttagcgatcgtgtactggtgatgcatgaagggaaactaaaagccaacctgataaatcataacctgactcaggagcaggtgatggaagccgcattgaggagcgaacatcatgtcgaaaagcaatccgtctgaagtgaaattggccgtaccgacatccggtggcttctccgggctgaaatcactgaatttgcaggtcttcgtgatgattgcagctatcatcgcaatcatgctgttctttacctggaccaccgatggtgcctacttaagcgcccgtaacgtctccaacctgttacgccagaccgcgattaccggcatcctcgcggtaggaatggtgttcgtcataatttctgctgaaatcgacctttccgtcggctcaatgatggggctgttaggtggcgtcgcggcgatttgtgacgtctggttaggctggcctttgccacttaccatcattgtgacgctggttctgggactgcttctcggtgcctggaacggatggtgggtcgcgtaccgtaaagtcccttcatttattgtcaccctcgcgggcatgttggcatttcgcggcatactcattggcatcaccaacggcacgactgtatcccccaccagcgccgcgatgtcacaaattgggcaaagctatctccccgccagtaccggcttcatcattggcgcgcttggcttaatggcttttgttggttggcaatggcgcggaagaatgcgccgtcaggctttgggtttacagtctccggcctctaccgcagtagtcggtcgccaggctttaaccgctatcatcgtattaggcgcaatctggctgttgaatgattaccgtggcgttcccactcctgttctgctgctgacgttgctgttactcggcggaatgtttatggcaacgcggacggcatttggacgacgcatttatgccatcggcggcaatctggaagcagcacgtctctccgggattaacgttgaacgcaccaaacttgccgtgttcgcgattaacggattaatggtagccatcgccggattaatccttagttctcgacttggcgctggttcaccttctgcgggaaatatcgccgaactggacgcaattgcagcatgcgtgattggcggcaccagcctggctggcggtgtgggaagcgttgccggagcagtaatgggggcatttatcatggcttcactggataacggcatgagtatgatggatgtaccgaccttctggcagtatatcgttaaaggtgcgattctgttgctggcagtatggatggactccgcaaccaaacgccgttcttgattttgataaaaattttctcaaagccggttacgtattaccggttttgagtttttgcatgattcagcaggaaaagaaccatgtttactaaacgtcaccgcatcacattactgttcaatgccaataaagcctatgaccggcaggtagtagaaggcgtaggggaatatttacaggcgtcacaatcggaatgggatattttcattgaagaagatttccgcgcccgcattgataaaatcaaggactggttaggagatggcgtcattgccgacttcgacgacaaacagatcgagcaagcgctggctgatgtcgacgtccccattgttggggttggcggctcgtatcaccttgcagaaagttacccacccgttcattacattgccaccgataactatgcgctggttgaaagcgcatttttgcatttaaaagagaaaggcgttaaccgctttgctttttatggtcttccggaatcaagcggcaaacgttgggccactgagcgcgaatatgcatttcgtcagcttgtcgccgaagaaaagtatcgcggagtggtttatcaggggttagaaaccgcgccagagaactggcaacacgcgcaaaatcggctggcagactggctacaaacgctaccaccgcaaaccgggattattgccgttactgacgcccgagcgcggcatattctgcaagtatgtgaacatctacatattcccgtaccggaaaaattatgcgtgattggcatcgataacgaagaactgacccgctatctgtcgcgtgtcgccctttcttcggtcgctcagggcgcgcggcaaatgggctatcaggcggcaaaactgttgcatcgattattagataaagaagaaatgccgctacagcgaattttggtcccaccagttcgcgtcattgaacggcgctcaacagattatcgctcgctgaccgatcccgccgttattcaggccatgcattacattcgtaatcacgcctgtaaagggattaaagtggatcaggtactggatgcggtcgggatctcgcgctccaatcttgagaagcgttttaaagaagaggtgggtgaaaccatccatgccatgattcatgccgagaagctggagaaagcgcgcagtctgctgatttcaaccaccttgtcgatcaatgagatatcgcaaatgtgcggttatccatcgctgcaatatttctactctgtttttaaaaaagcatatgacacgacgccaaaagagtatcgcgatgtaaatagcgaggtcatgttgtagcgatgatgagaattgtcggcgtcacatcaggtaacgctgcgtggttgtcggatgcggcgtgaacgccttatccgacctacccgccaggcatgataaaacgcaccaacaacgcttcaggctcgtagctcaactgcctgagacaaagtaaaaagccttatccgactgacaagtcggataaggctcaaggaaatgcaattacatatgcgccgcgattaaccgttggttatcctggtacattgcgaacaggtagttgttataactcttccctttggtcgagtagcccttcagcttgtgaatcatcgctgtggcagtcacttcctgatccgctttacgcagctgcgcacgcgatttacggaacgaagagtaagccgggtgcgtattcaggttagtgacataggcgctcaccgattctttgacagaactaaactgtgagtaccctttcactttacctggcgcattggtacaacgtcctttcatcgatttcatgccgaacaggttgttgttgttgcgcgccagcttcgacgttccccaaccgctttctgctgcagccatcgtcgccaccatactggtggggataatgtctacgcgttcaagcaaggtattccacgggatttttcgcgtattaccggaccacttcaccttgtagcgtttggcgatgtctttcagacgcgcacgctcagcaggtgaccattggccctgatactgttttgaaatgagccagttacgttccgcagtaatggccgcattttggctggtaatgtaaggcattacggtccggagaaacgcctttttccttggtgttccggaagggtattttcgcaaatcaggaagtgaactactctttgcactattgcgagaatactcttgtttactgcttacctgtttattactagctttagttaagtgggacttttgactcgctgttgttgtgtgcgtcttcgctaacacctcactcgaaaacaccagagtgagtaacataagaatcatcgccccatatcgtcgtatgggagtcaaaatcatcaggtctcctggtcggatttaatcattccaacaccttatatttttcacaaatttgagagttgaatctcaaatcatatcaaaaatagctgtcaagagcaccccaaggaatagtccaaatctgaaactatgtcacgtgttaacgattcagattggcgctaaatcgcagaaaatgtgggggttatcgcaaaattcagccgttttttgcgcgagatcgctcacccttgcttctcatcctgtggacttaccgctcagggatgagttttgtttggcttatcgctggcaaactgtctgaaatcgcagcaataaggactcatccgccatgaaactcgccgcctgttttctgacactccttcctggcttcgccgttgccgccagctggacttctccggggtttcccgcctttagcgaacaggggacaggaacatttgtcagccacgcgcagttgcccaaaggtacgcgtccactaacgctaaattttgaccaacagtgctggcagcctgcggatgcgataaaactcaatcagatgctttccctgcaaccttgtagcaacacgccgcctcaatggcgattgttcagggacggcgaatatacgctgcaaatagacacccgctccggtacgccaacattgatgatttccatccagaacgccgccgaaccggtagcaagcctggtccgtgaatgcccgaaatgggatggattaccgctcacagtggatgtcagcgccactttcccggaaggagccgccgtacgggattattacagccagcaaattgcgatagtgaagaacggtcaaataatgttacaacccgctgccaccagcaacggtttactcctgctggaacgggcagaaactgacacatccgcccctttcgactggcataacgccacggtttactttgtgctgacagatcgtttcgaaaacggcgatcccagtaatgaccagagttacggacgtcataaagacggtatggcggaaattggcacttttcacggcggcgatttacgcggcctgaccaacaaactggattacctccagcagttgggcgttaatgctttatggataagcgccccatttgagcaaattcacggctgggtcggcggcggtacaaaaggcgatttcccgcattatgcctaccacggttattacacacaggactggacgaatcttgatgccaatatgggcaacgaagccgatctacggacgctggttgatagcgcacatcagcgcggtattcgtattctctttgatgtcgtgatgaaccacaccggctatgccacgctggcggatatgcaggagtatcagtttggcgcgttatatctttctggtgacgaagtgaaaaaatcgctgggtgaacgctggagcgactggaaacctgccgccgggcaaacctggcatagctttaacgattacattaatttcagcgacaaaacaggctgggataaatggtggggaaaaaactggatcagaacggatatcggcgattacgacaatcctggattcgacgatctcactatgtcgctagcctttttgccggatatcaaaaccgaatcaactaccgcttctggtctgccggtgttctataaaaacaaaatggatacccacgccaaagccattgacggctatacgccgcgcgattacttaacccactggttaagtcagtgggtccgcgactatgggattgatggttttcgggtcgataccgccaaacatgttgagttgcccgcctggcagcaactgaaaaccgaagccagcgccgcgcttcgcgaatggaaaaaagctaaccccgacaaagcattagatgacaaacctttctggatgaccggtgaagcctggggccacggcgtgatgcaaagtgactactatcgccacggcttcgatgcgatgatcaatttcgattatcaggagcaggcggcgaaagcagtcgactgtctggcgcagatggatacgacctggcagcaaatggcggagaaattgcagggtttcaacgtgttgagctacctctcgtcgcatgatacccgcctgttccgtgaagggggcgacaaagcagcagagttattactattagcgccaggcgcggtacaaatcttttatggtgatgaatcctcgcgtccgttcggtcctacaggttctgatccgctgcaaggtacacgttcggatatgaactggcaggatgttagcggtaaatctgccgccagcgtcgcgcactggcagaaaatcagccagttccgcgcccgccatcccgcaattggcgcgggcaaacaaacgacacttttgctgaagcagggctacggctttgttcgtgagcatggcgacgataaagtgctggtcgtctgggcagggcaacagtaacttttccggcttcccgttcgtcagtacctcgggaagccgccaaccaggataaaatgtcagccctaatcagcgttgcaggataaagcaccgctcactcttcaacagaccgatttgcaccccagcaaatgtagcgttattgttaccttccttgctacagagttcgacagatatcccgctatgacattctccctttttggtgacaaatttacccgccactccggcattacgctgttgatggaagatctgaacgacggtttacgcacgcctggcgcgattatgctcggcggcggtaatccggcgcagatcccggaaatgcaggactacttccagacgctactgaccgacatgctggaaagtggcaaagcgactgatgcactgtgtaactacgacggtccacaggggaaaacggagctactcacactgcttgccggaatgctgcgcgagaagttgggttgggatatcgaaccacagaatattgcactaacaaacggcagccagagcgcgtttttctacttatttaacctgtttgccggacgccgtgccgatggtcgggtcaaaaaagtgctgttcccgcttgcaccggaatacattggctatgctgacgccggactggaagaagatctgtttgtctctgcgcgtccgaatattgaactgctgccggaaggccagtttaaataccacgtcgattttgagcatctgcatattggcgaagaaaccgggatgatttgcgtctcccggccgacgaatccaacaggcaatgtgattactgacgaagagttgctgaagcttgacgcgctgggcaatcaacacggcattccgctggtgattgataacgcttatggcgtcccgttcccgggtatcatcttcagtgaagcgcgcccgctatggaatccgaatatcgtgctgtgcatgagtctttccaagctgggtctacctggctcccgctgcggcattatcatcgccaatgaaaaaatcatcaccgccatcaccaatatgaacggcattatcagcctggcacctggcggtattggtccggcgatgatgtgtgaaatgattaagcgtaacgatctgctgcgcctgtctgaaacagtcatcaaaccgttttactaccagcgtgttcaggaaactatcgccatcattcgccgctatttaccggaaaatcgctgcctgattcataaaccggaaggagccattttcctctggctatggtttaaggatttgcccattacgaccaagcagctctatcagcgcctgaaagcacgcggcgtgctgatggtgccggggcacaacttcttcccagggctggataaaccgtggccgcatacgcatcaatgtatgcgcatgaactacgtaccagagccggagaaaattgaggcgggggtgaagattctggcggaagagatagaaagagcctgggctgaaagtcactaaaaattgcctgatgcgctacgcttatcaggcctacatgatttctgcaatatattgaatttggaagaatttgtaggccggataaggcgtttacgccgcatctggcataaacaaagcgcactgttccggcgttgagaaacgccggaaaacgtttcaaacaggctgctgccgtagccgatgccgctgcactttctcgacatccatgcactgcaacgcctttgtcgggcaggcttcaacacaggccggtcccgtctcccgatgccagcacagatcgcacttaatcgccctcgcctttttgcgcgaagaaacgacctccatcgcaccaaacgggcaagccagcatacagcttttacagccaatgcaacgtgtttgttcaacgaaaatatgcccatgttcgcggcttatcgcgtcaacagggcagacattcgcgcacggtgcatcttcacactgatgacaggctactgccgtggtccagcagtggtctttaatgacacgaatacgggaaataaactcgtctggtgacaacgcagcgcaatcctgattctcatgatgcgacactgcgcaagccacttcacaggtacggcaaccgatacatttcgtcgcatccgcaataataaaccggttcatgatcactcctttgcactaaaacagcagagtgccagagagcgcgtccctactgctttgatccaacgaaggaaatgttaaagttttggcacttgtccaaagcgttatgtgatcgcgcccaggtcatccctgacagtaaatcccagttcattagaaatagcctgcgcggtttcacgcagtggtttcaggagatttttctctcccacctgtttcagacgtgatgtcgaaagcgaaatcgacacggcgtacggcacccgcccatgaatatcaaacaccggaacagcaatacaggagacgccgagttcgttttcttctctgtccatcgccgctccgctttcacgaatgtgcgccagttcgtcgaacatcgcgggcagctcggtaatggtattgcgggttaacggctggatctcatgctgatggctttcccagtatgacttcacgtagtccgggtgaccaaacgccatgtagatcttgcccattgcggaacagtagagcggcatatgctggccaatataggcacgggttcgcagcatcccggttgtgggttccagcttataaatcaaaatagcgtgatcgtcttcgcggctggagaagttaatggtttcaccagtggcgatgttcagtgcctcaagatgcggagcggcgatatgaatgatattcagcgaagacagcgccttctgcccgacggcaataaatttggtggtcaggcgataactccctgcggcaggcgcggtggtcacatagccgcaggactgtaatccctgcaataagcgatggacggtactcttatttaaaccagccagctccgaaagatgcgccaacggacaaccgtttggatagttgctcaaaatctcaatcagcatcaacccgcgaaacagactctggcttccggctggacgctctttttcctgcgccatctcgttctctttttttcccatcacttctttccccattttgtcgcgtcctgatggtagcgcaaagtgtgccgtagttcacgatctcgacagataatttataaccaattgatttttatgtcttttgaaattcatcaatcagattgccttgttaaaaagtgatcgatatatttgaaatcaagtttcgcatattgaaattttaagccaaaaaagcgatcaaaaaaacaaggaagcctgggatgaaagtgacatttgagcagttaaaagcagcctttaatcgggtcttaatttcacgcggcgttgacagcgaaacggctgacgcctgtgcagagatgttcgcccgcaccaccgaatccggcgtttattctcacggcgttaatcgtttccctcgtttcattcaacaactggaaaacggcgatatcattcctgatgcccaacccaaacgtataaccagcctcggcgcaattgaacagtgggacgcccagcgttcgatcggtaacctgacagcgaaaaagatgatggatcgcgccattgaactggctgccgatcacggtattggtctggtggcactacgtaatgccaaccactggatgcgcggcggcagctacggctggcaggcggcggaaaaaggctatattggcatttgctggaccaactccatcgccgtaatgccgccgtggggcgcaaaagagtgtcgcataggcactaacccgctgatcgtcgccattccttccacgccgatcaccatggtcgatatgtcgatgtcgatgttctcttacggcatgttagaagttaaccgtctggcaggtcgtcagctcccggtcgatggtggctttgatgatgagggcaatttgaccaaagaacctggcgttatcgagaagaatcgccgcattttgccgatgggctactggaaaggttctggcatgtcgattgtgctggatatgatcgctactctcctttccgacggcgcatccgttgccgaagtcacccaggacaacagcgacgaatacggcatttcacaaatttttattgccattgaagtggacaagcttatcgacggtcccacccgcgatgccaagctgcaacgcatcatggattacgttactagtgccgagcgtgctgacgaaaatcaggccattcgcttacccggccatgaatttactaccctgctggccgaaaaccgccgtaacggcatcactgttgatgacagcgtgtgggccaaaatccaggcgttatgaggagataagtcatgatttttggacatatcgcgcagcccaatccgtgccgtttgcccgccgccattgaaaaggcgctcgattttctgcgcgctaccgatttcaacgccctggagccgggcgttgtcgaaatcgacggcaaaaatatttatacgcaaattatcgatttaaccacacgcgaagcggtggtaaaccgtccggaagtgcatcgtcggtatatcgatattcagtttctggcgtggggcgaagagaaaatcggcattgctattgatacgggaaataataaagtcagcgaatcactattagagcagcgcaatattattttttatcacgacagtgaacatgaatcatttatagaaatgataccgggcagctacgcaattttctttccgcaggatgttcaccgaccaggttgtattatgcaaacagcctctgagatacgaaaaattgtggttaaagtcgcattaacggcgctgaattaatcgaataatcgtctacgccagaacgcctgggtaatgttattgctctaactatattaataattcaggttgctgcacatgcgacttgaattatgacagacatagcctcaaggaatagctatgaaaaaaatactcgaagcaatactggcgattaatctcgccgtactttcctgtattgtatttataaacattattttaagatatggttttcagacaagcattttatctgttgatgaattgtcacgttatttatttgtctggttaacgtttattggcgcgattgtagcttttatggataacgcccacgttcaggtcacctttctggtggagaaactctcccccgcatggcagcgacgagtcgctctggttacccattccttaatcttatttatttgtggcgcactggcctggggcgcaacgctaaaaacaattcaggactggagcgattattcaccgatcctcggtttacccatcggcctgatgtatgccgcttgtctgcccaccagcctcgttatcgcattctttgaactgcgtcatttatatcaactcatcacgcgtagcaattctctaacgtcgccaccgcaaggagcttaatcatggctgtgctgatttttctgggctgtctgttgggtggtattgctatcggtttgcctattgcctgggcactgttgttgtgcggggcggcgttaatgttctggctggacatgtttgatgtccagatcatggcacaaacgctggtgaacggagccgatagcttctccctgctggcgattccgttctttgtgctggcgggtgaaatcatgaatgcgggcggcttgtcaaaacgcattgttgacctgccgatgaaactggtggggcataaaccaggcgggctgggctacgtcggcgtgctggcagctatgattatggcgagcctttctggttctgccgttgcggataccgccgccgttgccgctctactggtgccgatgatgcgcagcgccaactatccggtcaaccgggcggcggggctgattgcctctggcggcattatcgcgccaattattcccccttccattccgtttattatcttcggcgtttccagcggattatccatcagtaagctgtttatggcgggcattgcccctggcatgatgatgggcgcaacgctgatgcttacctggtggtggcaggccagtcgccttaatttaccccgccagcaaaaagcaacgatgcaggaaatctggcactcttttgtctccggtatctgggcgctgtttcttccagtcatcattattggcgggtttcgctccggcctgtttacccctaccgaagccggggccgttgctgctttctatgcgctgtttgtcgccacagttatttaccgtgaaatgaccttcgccacactttggcatgtactcattggcgcggcgaaaaccacctcagtggttatgtttctggtggcctcggcacaagtttccgcctggctgattaccattgctgaactgccgatgatggtttctgatttactgcaaccgttggtcgattcaccgcgtctgctgtttatcgtcattatggtggctatcctgattgtcggcatggtcatggatttaacgccgacggtattaattcttaccccggtattaatgcctttagttaaagaggcaggaatcgatccgatttatttcggtgtcatgtttatcattaactgctcaatcggcttaattacaccgcctatcggtaatgtacttaacgttatttcaggggtggcaaaactcaaattcgatcgatgcagtcagaggcgttttcccttacgtcctggttttatattcattattagtcgtatttgtttttattcccgatctcatcatcctccctttgaaatggattaattaaaaggaaaatattatgaaattacgctctgtaacctacgcattattcattgctggcctggctgcattcagcacatcttctctggcggcacaatctttacgtttcggttatgaaacatcacaaaccgactcgcaacatattgcggcgaaaaaattcaatgatttattgcaggagagaaccaaaggcgagctgaaattaaaactgttcccggacagcactctcggtaacgcgcaggcgatgatcagcggcgtacgtggcggcaccatcgatatggaaatgtccggctcgaataactttgccgggttatcaccagtgatgaacttgcttgatgtccctttcctgttccgcgataccgctcacgcgcataaaacgctcgacggcaaagtcggtgatgatctgaaagcctcacttgaaggtaaaggactgaaagtactggcctactgggaaaacggctggcgcgatgtcaccaactcgcgcgcaccggttaaaacccccgccgacctgaaagggctgaaaatccgcaccaacaatagcccgatgaatatcgccgcattcaaagtctttggcgctaacccgatcccgatgccgtttgccgaagtctataccgggctggaaacccgcactatcgacgctcaggaacacccgatcaacgtcgtctggtcagcaaaatttttcgaagtgcagaagttcctttctctgacgcaccacgcctattccccgcttctggtggtgatcaacaaagcgaagtttgatggcttaagtccggagttccagcaggcgctagtttcatctgcacaagaagcgggtaactatcagcgcaaactggttgctgaagatcagcaaaaaatcatcgacggcatgaaagaagcgggcgtggaagtcatcaccgatctcgaccgcaaagcctttagcgacgcactggggaatcaggttcgcgacatgtttgttaaagatgtgccgcagggagctgatctgctgaaagccgtggatgaggtgcaataaaccatgacgcaatactggctggggttagattgtggcggtagctggctgaaagccgggctgtatgaccgcgaaggccgggaggcaggcgtgcagcgcctgccgctgtgcgcattaagcccgcagccaggctgggcagagcgcgatatggcagaactgtggcaatgctgcatggctgtcattcgcgccctgcttactcattctggtgttagcggggaacaaattgtcggtatcggcatctccgcacagggaaagggcttgtttttgctggataaaaacgacaaaccgctcgggaatgctattttgtcctcggaccgccgggcgatggaaatcgttcgtcgctggcaggaagatggcatcccggaaaaactctacccgctgacccgacaaaccttgtggaccgggcatccggtgtcgctgttacgctggctgaaagagcacgaaccagaacgctacgcgcaaattggctgcgtgatgatgacgcacgactacctgcgctggtgtttaactggcgtcaaaggctgtgaagagagcaatatttccgagtccaacctctacaacatgagtcttggggaatatgacccgtgcctcaccgactggctggggatcgctgaaatcaatcacgccctgccgcctgttgtcggatctgccgaaatctgcggggagatcaccgctcagacagccgccctgaccggtctgaaagcgggtacgcccgttgttggcggcctgtttgatgtggtttccaccgcactctgcgccgggatcgaagacgaatttaccctcaatgcggtgatggggacctgggcggtgaccagcggcataacccgcggtttacgtgacggtgaagcgcatccgtatgtctatggtcgctacgttaacgatggtgaatttatcgttcacgaagccagccctacctcttccggcaacctcgaatggtttaccgcacagtggggagaaatctcgtttgatgagatcaatcaggccgttgccagcttgccgaaggctgggggcgatctctttttcctgccgttcctgtacggcagcaacgccggactcgagatgaccagtggtttctacgggatgcaggccattcacacccgcgcgcacctgttgcaggccatctatgaaggggtggtgttcagccatatgacccacctcaaccgaatgcgcgaacgttttactgatgttcacaccctacgcgtcactggcggcccggcgcactccgatgtctggatgcaaatgctggcggacgtcagcggtctgcgtatcgagctgccgcaggtggaagaaaccggctgctttggtgcggcccttgccgcccgcgtcggcaccggggtttatcacaacttcagcgaagcccaacgtgacttgcgacacccggtgcgcaccctgctgccagatatgaccgcccatcagctttaccaaaaaaaatatcaacgttatcagcatctcattgccgcacttcagggctttcacgcccgcattaaggagcacacattatgagccgaccacttctgcaactggccctcgaccactcatcacttgaagccgcgcagcgcgacgtgacgctgttaaaagacagcgtcgatatcgtcgaagcgggcaccattctctgtttaaacgaagggcttggcgcggtgaaagccttgcgcgaacagtgcccggacaaaatcatcgttgctgactggaaggtcgccgacgctggtgaaacgctcgcgcaacaggcgtttggcgcaggcgctaactggatgaccatcatctgcgccgcgccgctcgcgacggtagaaaaaggccacgcaatggcacaacgctgcgggggtgaaattcagatagagctgttcggtaactggacgctggacgacgcccgcgactggcatcgtattggcgtgcggcaggccatttatcatcgcggtcgtgatgcacaggccagcgggcaacagtggggcgaagccgatctggcacgcatgaaggcgctttcagatatcggccttgagctttccattactggcgggattacccctgctgacctgccgctgtttaaagatatccgcgtgaaagcgtttattgccgggcgggcactggcaggcgcggcaaatccggcgcaagtggctggcgatttccatgcgcaaatcgacgctatctggggaggtgcgcgtgcgtaatcatcagttagggatttatgaaaaagcgctggcgaaagatctctcctggccggagcggctggtgctggcaaaaagctgcggttttgattttgtcgaaatgtcggtggatgaaaccgacgaacggctctcacgtcttgactggagcgccgcacaaaggacttcgctggttgccgcgatgatcgaaacaggtgttgggatcccgtcgatgtgcctgtccgcacatcgtcgctttccctttggtagccgtgacgaggcagtgcgcgaacgggcgcgggaaatcatgagtaaagcgattcgcctggcgcgcgatctcggcattcgcaccatccagctggcaggttatgacgtctattacgaagaccacgacgaaggcacccggcaacgttttgctgaagggctggcgtgggcagtcgaacaggcggcggcatcacaagtaatgctggcggtggagattatggataccgcgtttatgaactccatcagcaaatggaaaaaatgggacgagatgctcgcctcaccgtggttcaccgtctacccggacgtcggcaacctcagcgcctggggcaatgatgttcccgccgaactgaaactgggcattgaccgtatcgccgcgatccacctgaaagacacccagccagtcaccgggcaaagtcccggacagttccgcgacgtgccgtttggcgaaggctgcgtcgatttcgttggcatcttcaaaacgctgcataaactgaactatcgcggttctttcctgattgagatgtggaccgaaaaagccaaagagccggtgctggagattattcaggcgcggcgttggattgaagcgcgtatgcaggaggctggatttatatgttagagcaactgaaagccgacgtgctggcggcgaatctggcgcttcccgctcaccatctggtgacgttcacctggggcaatgtcagcgcggtagacgaaacgcggcaatggatggtaatcaaaccttccggcgtcgagtacgacgtgatgaccgccgacgatatggtggtggttgagatagccagcggtaaggtggtggaaggcagcaaaaaaccctcttccgatacaccaacgcatctggcgctctaccgtcgctatgccgaaattggcggtattgtgcatacccactcgcgccacgccaccatctggtcacaggccgggctggatctccccgcctggggcaccacccacgccgattatttttacggtgccatcccctgcacgcgacagatgaccgcagaggagattaacggcgaatatgaatatcagaccggcgaagtgatcattgaaaccttcgaagaacgtggcaggagtccggcacaaatcccggcggtgctggtgcattctcacggcccgttcgcatggggtaaaaacgccgccgatgccgtgcataacgccgtagtactcgaagaatgcgcctatatgggtctattctcgcgccagcttgcgccgcagctccctgcgatgcaaaacgaactgctggataagcactacctgcgtaagcatggggccaatgcctattacgggcagtaatccctcacgccggggcttcatcgccccggcactacgaattgatatgttccttgctgtaacgccgcttccacgctgctggcgttaaaccagtatgtttctgaaaaatctgccggaaatagccaacgtcattaaaccgtattgcatggagcaggccgacaacgtcgagtcactgcataacctgttgctgcccgccgatgcgccatttacgacatttgaaggcaagggattgttcagccataagatcctgattcagacgccaggttcccggtatgaacagagcaatccagagcaacaacctttgtggcattacgacggagcaccagccgcaccgacatccaccggtgaattaaaaacgccagctcaccccggtgacaaaggtaaaactctcattacgatcaatcatcgggctgtcggtaatctcttccggcagctcgctgtatcctgcgctcgccatcaatacgacgtgctctcctatcgggtattttgccgtcaggctgacatagggcacccaggcatcctgcgcggaataacttgccagaccgctacgacgggactcactctctgaaatgccatagtaatagtcactgaaattctcgtcataatagagaacgcccagcgcaggtgtcagcgacagacgacctatctgcattttgtggaataccgatagctcccccacccagccgttgctgttatccagaacgtccgcagctgcagaggctttcacggttccccaacgctcgtggtgataccaggcaacccccgccatagccgtactatcacgcttatcaagctgttgcatggcataatcgtcattatcggtagggtcaaattccagcggcatccaggatgcggtcaggctaagttcatttttttcactttgcgacagaataaaacctaacgtggtctgacgaacataaaaagtatcaccttcataactaatcagcggaattgccttcgtattttcattataaccgcgataaggcgattcattataagccgcaccagcaccaatggataattcagaagcagttgcgcttgccataaaaggcaacgcaaataacgccacaatattgcgattaattaacatgtccggtattccattttaaaataagataaaaaagagtcggcataataatgcttacaatttctccggtgcaagattcatatttatatagtaatatataaaattatatataattgggctgttgcgatgacaaaattacaacttaagtaccgggagttaaaaattatctcggtaatcgctgccagtgaaaatatcagccatgccgcgactgtacttggcatcgcacaggccaacgtcagcaaatatcttgctgattttgaatcaaaagtgggtttaaaagtctttgaccgaaccacccggcagctgatgctcacaccttttggcaccgcgctgttaccgtacatcaacgacatgctggacagaaacgagcaacttaataattttattgcagattataagcatgagaaacgtggtcgggtcaccatctacgccccaaccggcataattacctatttatccaaacatgtaatcgataaaattaaagatatcggtgatatcaccttatcgctaaaaacctgcaatcttgagcgtaatgccttttatgaaggcgtcgaatttcctgatgattgtgatgttttaatcagctacgctccaccaaaagatgaatcgctggttgccagttttattacccaatatgccgtaaccgcttatgccagccagcgctatcttgagaaacatcccattagccgtcctgacgaactcgaacatcactcctgtattttgatcgactcgatgatgatcgacgacgcgaatatctggcgcttcaacgtcgccgggagtaaagaggtgcgggattatcgcgtgaagggaaattacgtttgcgacaacacgcaatctgcgctggagctggcacgaaatcacctggggattgtgtttgcgccagacaaaagtgtgcagagcgacctgcaagacggcacgctggtgccctgctttcagcaaccctatgaatggtggctggatctggtggctatcttccgtaaacgggaataccagccctggcgggtccagtatgtgctggatgaaatgctgcgtgaaattcgccaccagcttgctcagtcgcagcaactgcggcctgaacaagcggcggaaagcgaagattaatgatcgagataaaggtaatgcacccagctggtcatgcgtaatagcactttgcgcatcaccgagacatggctgaaatgatcagagtaaaccgccacctgggcgtaaataccgtctggtaaagcgctcaaatcagtgtgctcatccagttcaatggtcgcgataacgccatctgaacccggcgctgtgtttaacgtctgtaaggtgccggtcgactgataagctccgccgggaacggctggactaatggctgccagcttaccgctgaataccttacctggcagagcattaaacaccacttccgcatcgtcgccaggagccagtcgcagcaaggagttctgacggaactgcgccacgatttgtcgtttctgatcgggtataaacaccatcaccggacgtagcggcagcgacgcggcataggtacccggacgaatcagtacctgggtcacataaccatcgctcggcgcacgcactatcgtctgctcaaggttatattttgcttccgcgagctgtgctttcaggctggcgatttgagaatgttcacccaacaccaggctatccagctggctctggatctgtttttgttccgccgccgatgacttcacggaggcttcctgcgccagataattttgccgcgccacatcgatatcgcgttctgaaaacgggtttactttcgcctggctgccacgtgcgtaacgctgatactctttagcgaatttatcccgcgtggcctttgcctgctgagtattcgccgccatctcatctaactctgcgcccaacgcccgctgtttatgttctgcggtaacgatatccgccatcagccgatccacccgcgcctgataacgcgtcgggtccagtcgaaatagcacctcaccttttttaatcagcgtatttttcttatccgtcacttcaatcaccacaccagtcacctgtgggacaacaggaatagaaataaccgctttttgcgctttaaaggtatacggatggttatagttcattaacagaattagaccgctgacaataaatattccacccagggccgctgtgggaatggtccatttatttacgggaattttgaagatcttaaacattgcccatgcaaaagccacataggtcaaaataatcagtaaatccataagtattactcggcagaagaggatttgatgtcggcgagctgtttctccagcccggcaatgcgctgttgcagttgcataacggatgaatcatggctttgcattccccatccccgctccgggcggtaaagcgtggcccaaatccacaaaaacggccagataacatgtaacgtaaaaagactcacccaaccagcaacatgaatggcgtcggcatgaggatgattacgttttttggcaatcaggtagggaatatcatgtaaaataatgatcccatagaagatcaccagaaatacaaaaataagcactcccagtgcaaaatagtccaggaacatatttccctcaaagaatataaaaaagaacaattaacgcatattatgaaatgccatgatgcagtgcaatttccttatttatataacgacatattgttttttatatactttcttaaatgtgctgtctggtttttcaacaggacgaggtttatcatattgaaatagtggaactattggccaaactaatgaataactccagtaaaacatccacagtacagattaagcgtattaaaccttcaattatctaccgtttattgctgattggcctcggatcaccaatggtgatttacggcctggttcgcccgctcaccatcgaaacgcgagattaaactcctgacaaaacacgccccagaaacgtacttctgttggcgtagtctgggttattgcgcacgtaggtttaaaacgtaaattgtaacaacgtgcgctttgtttatgccggatgcggcgtgtacgccttatccggcctacggtcaggttcccgtaggcatgataagacgcgtaagcgtcgcatcaggcaatgaatacccaatgcgaccagcttcttatatcagaacagccccaacggtttatccgagtagctcaccagcaggcacttggtttgctggtaatgctccagcatcatcttgtgggtttcgcgaccgatacctgattgtttgtagccaccaaacgccgcatgtgccgggtaagcgtgataacagttggtccacacgcgcccagcctgtatgccgcgccccatcttataggccagattaccgttgcggctccagacgcccgcgcccaggccatattgcgtatcgttcgccagctccagcgcttcttccatcgttttgaaggtggtcaccgccagcaccgggccaaaaatctcctcctggaacacccgcatattgttctgaccaaacagaatcgtcggttcgaggtagtagccgtctttcagttcaccttccagcagcttgcgccgcccgcctgtgagcacgtcagcgccctcttttttaccgatatcaatgtagttgaggatggtttccagttgcccgtgagaaacctgcgcgcccatttgcgtcacgctgtcgagcgggttaccgctacgaatgctttcgacacggcggatggcgcgttccataaagcgttcgtagatagattcctgcactaaagcacgactcggacaggtgcaaacttcgccctggttaaaggcaaacagtgcaaagccttccagcgctttatcgaaaaaggcatcttcttcatccatcacatcagcaaagaagatatttggcgacttaccgcccaactccagcgtcaccggaataatgttttgcgttgcgtattgcataatttgttggcccacttccgttgagccggtaaacgccactttggcgatgcgtttcgaggtcgccagatattcgccaattaccccacctgcgccattgaccacgttcaccacgcccggcggcagtaaatcaccgacaatttccattagcagcagtacagaaagcggggtaagacgtgcgggtttcagcaccacacagttgcccgccgccagcgcgggagccattttccagctcgccatcagcagcgggaagttccacgggataatctgccccaccacgcctaacggttcatggaaatgataggccacggtttcgctatcaacttcactgatcccaccttcctgcgcccgaatacacgaggcgaaatagcggaaatggtcaatcgccagcggtacatccgcagcactggtttcgcgaatgggtttgccgttatcccaggtttcagctgtcgctaacagctcgaggttttgttccattcgatcggcaatcttaaacagaatcgccgcacgatcctgcaccgaggtgtgcgcccatttatctttcactttgtgcgcagcatccagcgccagatcgatgtctcgtttgcccgaagacgccacttcgcacagcagctgcccggtcaccggcgtcagattctggtaatactcgccgtcggcaggggctacccattcgccgccaataaagttgtcatagcgggcttttaacttgagggggaaaccatactcgccgggcttaatctgtgctgaagggggattattggtcatgatcgtctccttgcggtgtgaggtataacaagggtagacgtgactggcgaaatcttcgccagtcggtaacagctttacgacagctatcacgaatttacgggcaagggttacagagatagttgaaaaagcggctaacaatttgccagccgttgtggaaatgatgattacctcgctgcataaatcgccacaatttcttcgtgagttgcctggatcgggttagtaaagccacaggcatctttcagggcattagtcgccaataccgcgaaatcttcttctttcacgttcaggtcgcgtaggcctgccgggatatccactttcttcgccagttcacggatggcgttaatgcaggcttcagcaccttccgcgtcgtttttacctgtcacgttcacgcccattgcagcggcacagtcacgcagacgtgcagcggcgactttgctgttgaatacctgaacgtgcggcagcaaaacggcgttacatacaccgtgtggcaggttgtagaaaccgcccagctggtgcgccatcgcatgaacataacccagagaagcattattgaacgccataccggcgaggaactgggcataagccattgcttcacgcgctttcgcattactgccatcttcaacggctaacggcaggttttcggcaatcatggtcacggctttcagtgcacaagcgtcagtgatcggcgtggcggcaatagaaacatatgcttcgatagcgtgcgttaaggcatccatacccgttgcggcggtcagtgacttcggcataccaatcatcagagaggagtcattgacagaaagcagcggagtgacatgtttatcaacaatcgccattttgatatgacgcgcttcgtcagtgatgatgcagaaacgggtcatttcagaggccgtacccgccgtggtattgatggcgatcatcggcagctgcggttttgcagagcggtcaacgccttcgtaatcgcgaatatcgccgccattggctgccaccagcgcaataccttttgcgcagtcgtgtggagaaccaccgcctaaggagatcacgctatcgcaattattctctttaagtaatttcaaacctgcggcgacgttttccgtggtggggttaggttgggtgccatcataaataacgctaaaaatattgcgttcttccagtgctttttgcacatcgcccgccatacctaatttcgttaacatattgtcagtgacaattaaggtacgggtaaatccataatctgccatcatattcattgcatcagtcaatgaatcagcgccgatgacattcacagaaggaataaagaacgttgaagctgccataacacactcctgaaagtgtaaaaaagggcgggcagcttactgaggattttcattcgaaaatatgatcagtattattgattatcaaaattaatctaataaaaagcacattgtattcattaaacaatgtgctttttttaaattcataagaattttgtattaatttattttaaaacttaattaatcatttccttatttttccggaaataataatgcgtcgcgcaataaatgatcatttccacgacgacgcgtaaagccaatgcggtcaaaatattccagaatctgaattgccagctttcggcctacgcctaagcgatcgcggaaatccgccgcgcaggttgaaccacactcctgatcgagatcgcggatcatattggcaaactcgacaatccgatcgttacggtaataacgatctttaacgatcgcggtaattattccttgctgcgccgcctggcgtagagtcaggcgcattgcctgctcgtcggttcccgtctcttttgccaggtcacgcacccaccacggttcgtcaccaaacagtggctctgctttttgccagatggcctgctgctcttcgctgaagcccgctttgtgatctggcagatgcagccagccgtgatggctgtggatgtcgccgctttcgcgcatcttttcaatcagcaacagtaccagcgcttcatcttccattggcaacgccatacgtcgcagacgttcgcgcccagggccaggttcatcgcgatgttgctcatgataagtcgctaatgtgtcgagaattttccgctgccagcgggcggcaaccggcgcattcaacaagctataaccagcctgaatataaccaggctgttgcagcaattcgcgcatcccttcgccgttgagctggcgcgcccaggcgaaatccgcaaggttaaccgcgccgcgttccagatgaacagataacgcatcggcatcgctctgcgcccgtgcaagagacgccagccattgcagatattccggcttacgtttaccgcgacgcggcgggttaagcatcacgacgcgcgctccggccagcgtgttgcgggcagagatatcgcgcaataccaggcggtcgttatctgccagccataacggggtgtcgaagaccagttcagcaaggttatcttccagcagtgaaacgcgtcccgtgacgtggctggcggcgtggtgaatatgcagcggctgccactgggtcagcggtgtatgggtttgaagctcgacaatcacccgtgtgaacggctctggcggcacatcggcaagcagccagtcgccacggttaatctgctctttttccgcatcacccgcgatgttaagcgcgatacgctgcccggcattggcggtttctgttggctggttttgcgcatgcagcgcacgtacacgcatcggtttatttacaccagtcagccagagtgaatcgcctaccttcacttccccgcttaacgccgtaccggtgacgaccagcccggcaccttttacggtaaatgcgcggtcaatcgcgaggcggaaactatgttggctggcgtgctcgcgttccggcaactgaagcagatgctcgcgcagggcatccattccccgaccttcggttgctgcggtgataaacagttttgcctcagcaaaaccgtattcccgcagaacctcctttacctggcgttcaacctcatcaacacgcgcttcgtccacgcgatcggctttggtcagcgccactgtcagcatcgggttaccggtcagctgcaaaatcgccagatgctcacgggtctgtgccatcacgccgtcatcgcacgccaccaccaacagcgcgtgatcgataccaccaacgcccgccagcatgttggaaagaaacttttcatgaccgggaacgtcgataaaaccaggcacgcgaccatccggctgcggccagtaggcatagccgagatcgatggtcatgccgcgctttttttcttccggcagacggtcagcatttacgccagtaatcgcctgcaataaggttgttttgccgtggtcaacgtgtccggcagtcgcaataatcatttcaacaacatctccaaaaaccgttgctcatcttcaaggcagcgtaaatccagccacaatcgtccgtcataaatacgaccaatcaccggcactggcaattcacgccagcgggcggctaatgactcaaggtggctaccgcgtccatcatggggtgtaaacgttaatgccgcgctcggcaggcgatcaaccggcagcgaaccactgccaatctgcgaaagacatggcataacctgtaccgcaaactccgcgccgtaatgtgcggcaaggggggcctgtaaacgttgtgcctggatttgaatgacctctgcgctgcgggtaagcaggcgcagggtcggtaatttttcactcagagcttcagggtgtaaataaagacgcaacgtggcttccagcgccgcgagggtcattttatccgcgcgtaatgcacgcttcagcgggtggctttgcaggcgggcgatcatctcttttttaccaacaataattcctgcctgcggcccgcctaacaacttgtcgccggagaaactcaccagactgacgcccgccgcaatcaactcctgcggcattggctctttcggcaaaccgtactggctaagatcgaccagcgagccactgcctaaatcagtcactacgggaacatccagctctttgccgagcgccaccagttccgcttcatctatcgctttggtgaacccctgaatgctgtagttactggtatgtactttcatcaacagtgcggtattttcattcaccgcctgacgataatcattcgcgtgcgtgcggttggtggtccctacttcgtgtagggtgcagcctgcctgacgcataacatcgggaatacgaaacgcgccgccaatctccaccagttcgccgcgagataccaccacctcttttccgctggcagtggccgccaacatcaataacaccgccgccgcattgttattgacgatacaggcatcttccgcccccgtaatacggcacagcagctgcgccagcgcccgatcgcgatgtccgcgtccggcgtcgtccagatcatactcgagggtcactggcgaacgcatagcctgcgcaacggcttccaccgcggcttccgcctgtaaagctcgcccaaggttggtatgcagcacggttcccgtcaggttgatcaccggacgcagcgcgctctgcgcttctttcgtcaaccgggcatcgacttcttgcgcccagttttcacaccacgcaggcagcgtctggctgccacgaatcacttctcgcgcttcgtcgagcatctgacgcaacaattccaccacgcgggtgtgaccataagtatcacgcaaagaaaggaaggagctatcgcgcaataagcgatcaatagccggaagttgactatagagggaacgcgtttcggttgtcataggaaacctggctgatcaaggccctctcacacggagaagggcgtttaacataaccacggattgtaacgtgagatgggtcaggaggacatatcgcgcatcaagcctttggcggttcggtgcgagcaaaactttcgcggctaaacaggttttcgaccagtttgactaagtgtgggcggtcgacacaccaacctggcgcaacgcggcggaaattgagatatccgacggcacaggcaatggcgatagtcgccagattgaccgtatcggttttgagtgtgccatcgaccagatatccttccagcacatccagactgcggttgattttctcccgctggcgtaacaattcatcttcagactgctgcgccgctggacgcgcctgttcacgcaccgataccagcccggcatccataatgccatccgccagtgcctcaattttgcgcacccgcaacgactccagcggatcgcgcggcaacatcgccggagcgacattcattaattcaatatattcagcgatgatcggcgaatcaaaccagcattcgccctcttcggtcaccagcaccggcacttttcctaacgggttaaattgcgccacgccgttgtccgcgttatagggcagttcattaataaattcgaaagttatgcccttttctaacaacagaatagaaagtttgcgtacaaacgggctggtgtagctaccgacgagtttcatgccgagtcctttgtgcgaggaaaaatatcagtatggcctggtgatgggaaaaagggcagaaaatgttgatggtttgttacttccaaataaatcacatatttatcatggtgatataaatattttcctaattatttcactctgatggatatctcacttcaggctttcttataaatctgtagggtttcgcctgtcagcagacaaataacccgataaaacaaggatgagaaatgagcggaaaaccggcagcgcgtcagggcgacatgacgcagtatggcggtagcattgttcagggttcagccggggtgcgcattggtgcccccaccggcgtggcctgttcggtgtgccccggcggagtgacgtccggccatccggtcaatcccctgctcggtgcaaaggtccttcccggtgaaaccgacatcgccctgcccggcccgctgccgttcatcctctcccgcacctacagcagttaccggacaaaaacgcccgcgccggtggggagcctcggccccggctggaaaatgcctgcggatatccgcttacagctgcgcgataacacactgatactcagtgataacggcggcagaagcctgtattttgagcacctgtttcccggtgaggacggttacagccgcagcgagtcactgtggctggtgcgcggcggcgtggcgaaactggatgaaggtcaccggctggccgcactctggcaggcgctgccggaagaactccgcttaagtccgcatcgttatctggcgacaaacagtccgcaggggccgtggtggctgctcggttggtgtgagcgggtgccggaagcggatgaggtgctgcctgcgccgctgccgccgtaccgggtactgaccgggctggtggaccgcttcgggcgcacacagacgttccaccgcgaagccgccggtgaattcagcggcgaaatcaccggcgtgacggatggtgcctggcgtcacttccggctggtactgaccacgcaggcgcagcgggcagaagaagcccggcagcaggccatttccggcgggacggaaccgtccgcttttcctgataccctgccgggttacaccgaatatggccgggacaacggcatccgtctgtctgccgtgtggctgacgcacgacccggaatacccggagaatttacctgccgcgccgctggtgcgctatggctggacgccacgcggcgaactggcggtggtgtatgaccgtagtggcaaacaggtgcgcagctttacttacgatgataaataccggggccggatggtggcgcaccgtcacacgggccggccggaaatccgttaccgttacgacagcgacgggcgggtgacagaacagctaaacccggcaggcttaagctacacgtatcagtatgagaaagaccgcatcaccatcaccgacagcctggaccgccgtgaagtgctgcacacgcagggcgaagccgggctgaagcgggtggtgaaaaaggaacacgcggacggcagcgtcacgcagagtcagtttgacgccgtgggcaggctcagggcacagacggatgccgcaggcaggacaacagagtacagcccggatgtggtgacgggcctcatcacgcgcataaccacgccggatggcagggcatcggcgttttactataaccaccacaaccagttaacgtcagccaccgggcctgacgggctggaattgcgccgggaatatgatgaattgggccgtctgattcaggaaactgcccctgacggcgatatcacccgctaccgttatgataatccacacagtgacttaccctgcgcaacggaagatgccaccggcagccggaaaaccatgacgtggagccgttacggtcagttgctgagcttcaccgactgttccggttatgtaacccgttatgaccatgaccgcttcgggcagatgacggcggtgcaccgcgaggaagggctgagtcagtaccgcgcatacgacagccgtggacagttaattgccgtgaaagacacgcagggccatgaaacgcggtatgaatacaacatcgccggtgacctgaccgccgtcattgccccggacggcagcagaaacgggacacagtacgatgcgtggggaaaggccgtccgtaccacgcagggcgggctaacgcgcagtatggaatacgatgctgccggacgggtcatccgcctgaccagtgaaaacggcagccacaccaccttccgttacgatgtacttgaccggctgatacaggaaaccggctttgacggccgcacacagcgttatcaccacgacctgaccggcaaacttatccgcagcgaggatgagggtctggtcacccactggcactatgacgaagcagaccgcctcacgcaccgcaccgtgaagggtgaaaccgcagagcggtggcagtatgacgaacgtggctggctgacagacatcagccatatcagcgaagggcaccgggtggcggtgcattacaggtatgatgagaaaggccggctgaccggtgagcgtcagacggtgcatcacccgcagacggaagcactgctctggcagcatgagaccagacatgcgtacaacgcgcaggggctggcgaaccgctgtataccggacagcctgcccgccgtggaatggctgacctacggcagcggttacctggcaggcatgaaactcggcgacacaccgctggtggagtacacccgcgaccgcctgcaccgggaaacgctgcgcagcttcggccgttatgaactcaccaccgcttatacccctgccgggcagttacagagccagcacctgaacagcctgctgtctgaccgcgattacacctggaacgacaacggcgaactcatccgcatcagcagcccgcgccagacccggagttacagctacagcaccaccggcaggctgaccggcgttcacaccaccgcagcgaatctggatatccgcatcccgtatgccacagacccggcaggtaaccgcctgcccgacccggagctgcacccggacagcaccctcagcatgtggccggataaccgtatcgcccgtgacgcgcactatctttaccggtatgaccgtcacggcaggctgacagagaaaaccgacctcatcccggaaggggttatccgcacggatgatgagcggactcaccggtaccattacgacagtcagcaccggctggtgcactacacgcggacacaatatgaagagccgctggtcgaaagtcgctatctttacgacccgctgggccgcagggtggcaaaacgggtgtggcggcgtgaacgggacctgacgggctggatgtcgctgtcacggaaaccgcaagtgacctggtacggctgggacggcgaccggctgaccacaatacagaacgacagaacccgcatccagacgatttatcagccggggagcttcacgccactcatcagagttgaaaccgccaccggtgagctggcgaaaacgcagcgccgcagcctggcggatgcgcttcagcagtccggcggcgaagacggtggcagtgtggtgttcccgccggtgctggtgcagatgctcgaccggctggaaagtgaaatcctggctgaccgggtgagtgaggaaagccgccgctggctggcatcgtgcggcctgaccgtggagcagatgcaaaaccagatggacccggtgtacacgccggcgcgaaaaatccacctgtaccactgcgaccatcgcggcctgccgctggcccttatcagcaaggaagggacaacagaatggtgcgcagaatacgatgaatggggcaacctgctgaatgaagagaacccgcatcagctgcagcagcttatccgcctgccggggcagcagtatgatgaggagtccggcctgtattacaaccgccaccgctattatgacccgctgcaggggcggtatatcactcaggatccgattgggctgaaggggggatggaatttttatcagtatccgttgaatccagttacgaatacagatcctctggggttagaagtttttcctagaccattccccttgccaattccatggcccaaaagccctgcacagcagcaagcagatgataatgctgcaaaagcattgacaaaatggtggaacgatacagcatcacaaagaatatttgactctctaatattgaataatccgggactagcattagatataacaatgatagcttctcgtggaaatgttgcagacacagggataactgatcgtgtcaatgacataataaatgacagattctggagtgatgggaaaaaacccgacagatgtgacgtacttcaggaactaattgattgtggtgatattagtgctaaagatgcaaaaagcacacagaaagcctggaattgtcgtcactccagacagtcaaacgataaaaaaagatagcccttgtggaggttcctgcaatgtcaaatacataccagaaaagaaaggcaagtaaagagtatggtttatataatcaatgtaagaaactaaatgatgatgaattatttcgcttacttgatgatcacaattccttgaaaaggatttcatctgccagagtattacagttaagaggtgggcaagacgctgttagattggcaattgagttctgctctgataaaaattatatccgtagagatatcggagcatttatactcgggcaaataaaaatttgcaaaaaatgcgaagataatgtttttaatattttgaacaatatggcattgaatgataagagcgcttgcgttcgagctacggcaatcgagtcaacggctcagcgatgcaagaaaaacccaatttattcacctaaaatagtagaacaatctcaaattactgcttttgataaatcgactaatgtcagacgtgctacagcatttgctatttctgttatcaatgataaagcaacaattccactattgattaatctgttaaaagatccaaatggagatgtcagaaactgggccgcatttgcaataaatatcaataaatatgataatagtgatattagggattgttttgtggagatgcttcaggataaaaatgaggaagtccgtattgaagcaataatcggactttcctacagaaaagataaaagggttttatctgttttatgcgatgagttaaaaaaaaatactgtttatgatgatatcattgaagctgcgggtgaattaggtgataaaacgctacttcctgttttagatactatgttgtacaagtttgatgacaatgaaattataacttccgctattgataagctgaagcgttcatagcgtgagttgcctatgcacagtgggggattcccgccggcacggtgcagatgctcgaccggctggaaagtgaaatcctggctgaccgggtgagtgaggaaagccgccgctggctggcatcgtgcggcctgaccgtggagcagatgaaaaaccagatggacccggtgtacacgccggcgcgaaaaatccacctgtaccactgcgaccatcgcggcctgccgctggcccttatcagcaaggaagggacaacagaatggtgcgcagaatacgatgaatggggcaacctgctgaatgaagagaacccgcatcagctgcagcagcttatccgcctgccggggcagcagtatgatgaggagtccggcctgtattacaaccgccaccgctattatgacccgctgcaggggcggtatatcactcaggatccgattgggctgaaggggggatggaatttttatcagtatccgttgaatccggtcataaatgtagatccgcaaggtttggttgatataaatttataccccgaaagtgatcttatccattctgtagctgatgagattaatatcccaggcgttttcacaatcggggggcatggtacccccacatctattgaatccgcaacgcgcagtatcatgacagctaaagatctagcatatctaattaaatttgatgggaattataaagatgggatgacagtttggttattttcttgtaatacaggtaaaggacaaaattcatttgctagctaattagctaaagagttacatacaaatgtaataggacctgacacgctatggacgtggtgggggcgaggaactaatggtaagttaaaaatggatacagtgctaacagcaccaacgaaccttaattcaaataaggatctaatggctataacaacaaaagaccttggtaattggataacatatgggccatctgggcaccccatttctaatatgcaaggtacgccagaaaaacccagtgatataagataggttgtagatgtatgaaagcatgcttgttactatttttttatttctcttttatttgtcaattgcatggtgctgatgtgaaaataaaacaaaacgaaagtatgatggggtctacagcaatgacctatgatttaagtgaagaaaagttgatgaaactgaagtataaatcacaacatggtgattcagaggcatcatttcgactatatcaatattactgctttactaaaaataacatttacaaacaattgcgattcttggaaagatcagcatctcaggggaatgttacagcgcagtttaattatggggtctttttatcagatacaaatccaacattatcagaatattataatttgaatagagctatttattggatggaattcgctgtaaataacggtaatattgatgcaaagagcaaacttcaagagctcaaaaagctaaagcgaatggatagaaggaagaataaggagaatccgtaaaagcaatagttcatcagactgccgcagcagtagtatgatgatgaatcagggctgtactataactattatcggtaacattaaccgcagcaggggcggtataacactcaggctccgattgggctggaaggtaggtggaatttttatcagtatccgttgaacccgatttctggaatcgatccccttgggattagccacctgtttatacagcataactttaggtatgctttcgtgtgtttcagatataccatgtgatgataatttttatgatgtgcttagtattccagtcgcttctggtaataatatgcaatgtaaaaataatccccgttgtacacatttataaatagatggccaatacctcaaggcctatggagttggaatgttaatgacccgggagcaagcaatagaaaacctgacggcatacgattagtaccgtcagttaatacaggaacttataatcgcaatggattttcaatacatagttgtttaaacgcttttggtccgtctttaggacctcgattctgttccgagggttgtataactggtttatctaatgacatgcaaaaattaaatgagttaatattttcagagccagatagcacattaacagttacggactaaaaaatatggcaaggttattaacaattgtatttttttctctatttctgcgagtgcagttactgcaagacaatttcagagagagttagatttggcagacaaagcaatattatgggcactaatatcagccagtactaaagagggacgaaaagcgtgttcactaagctattttgcctgtaaggccgcagaggctgaactcggactggcatatatggctgcgaatgataacaaggaatttctcacatccttatctaatataatgaggtacaaaatagatgctggactttccgaatcctatacatgctatttattaagtaagggaaagatcataagaccatatctgaaaaatctaaatccactccaacttgccgctgattgcattgaaacagtaaataaaataaaagataagaataaaaaaaatcattgatataaattcagttaatatttgtagtgatgataaaaatataaaattgagagttaatagtactattatggccattgatgattctataaagtgcatcgatgaatgataacttaattttatttaaaaatatattaataactcactctccaggagtttttttaacttagttttataatgaatacgataattaaaagtgaagaagaaaatagttgtatacatatattccatgaccctacattgtgatctatagattaaatattttttaaatgtgactgtcatccttcagataataaagccatcatcgcaatagatggaaaagcactcctgctcttttttgattagagccgtcgcaggaggaacaactcatatcatcattgcgatctcgacgatgtatagtctcatcctgcggcagaacaagacggataaaaaatccaatgagagcacactcatccagaacttattaacataatgaatattaaagaaaaatcatcgaagctaatgaagtaatatgcaaaaataattagtccttacaaggagcaaagttccataatctcccccctccccctcaatgatccaaataaagataatgcatccagctggtcattcttagcagcactttccgcatcaccgaaacatggctgaaatggtcggagtaaaccgccacctgggcgtagatgccgtcgggtaaggcatcgatatcatcgttagggtccagttcaatggttcccagcacaccgtccgtgccgggcacgaccgttaatgattgcaataccccctgcgcctgataagaaccgcctggcacgacaggtaaaatactagtcagtttgccgtgaaacacctgcccaggtagcgcgttaaacaccacttccgcatcatcgccaggtttcagacgtaacagcgagttttgccgaaattgggcgacaatttgccgtttttgctcggggatgaagaccatcaccggacgcagcggcaaggcagctgcgtatgtacctgggcggatcagtacctgagtaacgtagccattgctcggcgcgcgaatgacagtctgctcaaggttatattttgcttcagtaagttgcgctcttaagctcacaatctgcgattgctcgccgttaaccatactgtcgagctggctctggatctgcgcctgctccgccaccgagcctttcaccagcgcatcctgcgcgaggaaattttgccgcgcatcgtcgatgtcacgttccgagaacggattcaccgccgcctggctgcctttcaagtaacgttgataatttttaaacagacggtcgcgctccgctgaaacctgggtggtgttggcctgcgcttcagtgagctgcgcacgcagcgtctttatattatgcgtcgccgtcatcaggtcagcctgaagtctgtcaactcgcgcctggtaacgaaccgggtcgagcttaaaaagcacctcgcccttttgaataagctgattattcttgtcagtgacttcagtaacaattcccgtcacctgtggcgtgatagggatcgctatcactgccttttgcgcggtaaaagtgtaagggtggttgtagttcatcaacaaaatcaaaccactcaccagaaacacgcctcccagcgccgccgtcgccagcgtccactgatttaccggaatgcggaagattttaaagaccgcccacgccagcgccacgtaagttaaaacaatcaatagatccataattagatctccgggaacgtggaatagtcagtctttttctcggcggcgagttgatgctccagccgggaaattcggtcagaaagtgcggcgatttccgggtcagtcgctttctcctgcgacgcaacatgtgactgcataccccagccacgctccggttgatagagcgtcgcccagatccacagaaacggccagataacatgcagagtaaacaggctcacccagcccgccgtatgaatagcgtcggcatggggatggttgcgctttttggcaatcagataagggatgtcatgtatcgcgatgattccataaaaaatcaccagaaagacgaagatcagcactcccaacgcgaaatagtttagaaacatatctgcctcggattcacgtttatcagtgttgtttttgggctggcagccagaagggagtcaggctgatattttgacaataatccgggttcgcgattctcgccataacaccaaagaataatttttagaggtgatgagttgcttagttacataacgattgtatgacgaaggcataacatgctgtagatcacatcaggtgaacgccgtaagaaaatatcttgtgattcagatcacaaagattcaacaaaccatcaaaacaaaaatgtgacactactcacatttaaatgccatttttagcgaaaatcgccgccttgttgcttttttacacaagcgttttgtgatgaacgtcacgtcaattacctctctaccccctatatttatgtgattgatatcacacaaaaggccgtcgactggacagttaaccgattcagtgccagatttcgcagtatctacaaggtccggctacctctgccgccacattaacaaaaaacctcgggcttccagcctgcgcgacagcaaacataagaaggggtgtttttatgtcatccgatattaagatcaaagtgcaaagctttggtcgtttcctcagcaacatggtgatgccaaatatcggcgcgtttatcgcgtggggtatcatcaccgcgttatttattccaacagggtggttaccgaacgagacgctggcgaagctggtcgggccgatgatcacttatctcctgccgctgctgatcggttataccggtggtaagctggtaggcggcgaacgtggcggcgtagtcggtgccatcaccaccatgggcgttatcgtcggcgcagacatgccgatgttcctcggttctatgattgcaggtccgctgggcggctggtgcattaagcacttcgaccgctgggtagacggtaagatcaaatccggttttgagatgctggtgaataacttctccgcaggcatcatcgggatgatcctcgctattctggcattcctcggcattggcccgattgttgaagccctgtccaaaatgctggctgcgggcgttaacttcatggttgtccatgacatgctgccgctggcgtctatctttgttgaaccggcgaaaatcctgttcctcaacaacgccattaaccacggtatcttctcgccgctgggtattcagcagtcccatgaactgggtaaatcaatcttcttcctgattgaagctaacccaggtccaggtatgggcgtgctgctggcgtacatgttctttggtcgtggtagcgctaaacagtctgcgggcggtgcggcaatcatccacttcctggggggtatccacgaaatctacttcccgtatgtgctgatgaatccgcgtctgatcctcgcagtcatcctcggcggtatgactggcgtgttcacgctgactatcctgggcggtggtctggtttctccggcatctccgggttctatccttgctgtactggcgatgacaccaaaaggtgcttacttcgctaacatcgcgggtgtgtgtgcggcgatggctgtctccttcgttgtctctgctattttgctgaaaaccagcaaagtgaaagaagaagatgatattgaagcagcaactcgtcgtatgcaggacatgaaagctgagtctaaaggcgcatctccgctgtctgctggcgatgtgactaacgacctgagccacgtacgtaaaatcatcgttgcctgtgacgccggtatgggttccagtgcgatgggcgcaggcgttctgcgtaagaaaattcaggatgcaggtctgtcgcagatttctgttactaacagcgcgatcaacaacctgccgccagatgtggacctcgtcatcactcaccgtgacctgaccgaacgcgctatgcgccaggttccgcaggcacagcatatttcgctgaccaacttcctcgacagcggcctgtacaccagcctgaccgaacgtctggttgctgcccaacgccacacggcaaacgaagagaaagtaaaagacagcctgaaagacagctttgacgattccagtgctaacctgttcaagctaggcgcggagaacatcttcctcggtcgcaaagcggcaaccaaagaagaagcgattcgttttgctggcgagcagctggtgaaaggcggttacgttgagccggaatacgttcaggcgatgctggatcgtgaaaaactgaccccgacttatctgggtgagtctatcgcggtgccacacggtacggttgaagcgaaagatcgcgtactgaaaacgggcgtcgtgttctgccagtacccggaaggcgtgcgcttcggtgaagaagaagatgacattgcccgtctggtgattggtattgctgcccgtaacaacgagcacattcaggttatcaccagcctgaccaatgcactggatgatgagtccgtcatcgagcgtctggcacacaccaccagcgtggatgaagtgctggaactgctggcaggtcgtaagtaatccaatcccaccctctccacatggagaaggtggggttaattgcctgatgcgctacgcttatcaggcctacaggatgcatcacaatttgttgaatttgcacgttcttgtaggccggataaggcgcttacgccgcatccggcgctgcccctctcctcacggagagggtttgggtgagggaaaagcctcaccccagccctctcgggtaaaaacattgatgaaggttaatactatgaaagcattacattttggcgcaggtaatatcggtcgtggctttatcggtaaactgctggcagacgcgggtatccaactgacgtttgccgatgtcaatcaggtggtacttgatgccctgaatgcccgtcatagctatcaggtacatgtggttggtgaaaccgagcaggtagataccgtttccggcgtcaatgctgtcagcagcattggtgatgatgtcgttgatctgattgctcaggttgatttagtcactaccgccgttggcccggttgtgctggaacgtattgctccggcaatcgccaaagggcaggtgaaacgtaaagaacaaggtaatgaatccccgctgaacatcatcgcctgtgaaaacatggtacgcggtaccacgcagctgaaaggccatgtgatgaacgccctgccggaagacgccaaagcgtgggtagaagaacacgttggctttgtcgattccgccgttgaccgcatcgtaccgccttcggcttcggcaactaacgatccgctggaagtgacggtagaaaccttcagcgaatggattgtcgataaaacgcagttcaaaggcgcactgccgaacatcccaggcatggagttaaccgacaacctgatggcatttgtcgaacgtaaactcttcaccctgaacacgggtcatgctataaccgcgtacctcggaaaactggccggtcatcagaccattcgtgacgcgattctcgacgagaaaatccgcgcggtggtaaaaggtgcgatggaagaaagtggtgcagtattgatcaagcgctacggctttgacgctgacaagcatgcggcgtacatccagaaaattctcggccgttttgagaacccgtatctgaaagatgatgtagagcgcgtaggccgtcagccactgcgtaaactgagtgctggcgaccgtctgatcaagccactgctcggtacgctggaatatggtctgccacataaaaacctgattgaaggtattgccgctgcaatgcacttccgcagtgaagatgatccgcaggctcaggaactggcagcactgatcgctgacaaaggtccgcaggcggcgctggcacagatttccggtcttgatgccaacagcgaggttgtatccgaggcggtaaccgcttataaagcaatgcaataatggtggaccaggcgcaggacaccctgcgcccgaataacagattgtcagatatgcaggcaacaatggaacaaacccaggcctttgaaaaccgtgtgcttgagcgtctgaatgctggcaaaaccgtgcgaagctttctgatcaccgccgtcgagctcctgaccgaggcggtaaatcttctggtgcttcaggtattccgcaaagacgattacgcggtgaagtatgctgtagaaccgttactcgacggcgatggtccgctgggcgatctttctgtgcgtttaaaactcatttacgggttgggcgtcattaaccgccaggaatacgaagatgcggaactgctgatggcattgcgtgaagagctaaatcacgacggcaacgagtacgcctttaccgacgacgaaatccttggaccctttggtgaactgcactgcgtggcggcgttaccaccgccgccacagtttgaaccagcagactccagtttgtatgcaatgcaaattcagcgctatcaacaggctgtgcgatcaacaatggtcctttcactgactgagctgatttccaaaatcagcttaaaaaaagcctttcaaaagtaagcaacgtctgcttactgcccctctacctgcttcggccgataaagccgacgataatactccagacgttgtagatataacggcacgctttcatcgggtattccggacggaatcgcgttacggggaggaagttttttcagatactcccggaacgcctggcttgatgccatgaaatctacggctttatcgataagaagcggaacgttttcacctaatttgcccatgatgatatctccgtattaccccgcgccgggaatgcgcggccgccaattttagtttaggttcccggtaaagatgacattaaggaaaacgtgctgaatcctcaataatcatccgctgctgtttattatcttttttctatagatttcttaattaatcaacgaattgcgcagtttttgagcatgttaatgattacgttacagaactattacaatgtcattagttgtgaacaaagcacctggtcgcgcatactaggggctataaatttatctttatcagaagccatcacatgaaagaagtcgaaaaaaacgaaatcaaacgcctcagcgatcgcctggacgccatccgccaccagcaggccgatctttcgctggttgaagccgcagacaaatatgccgagctggaaaaagagaaagccacgctggaagcagaaattgctcgcctgcgtgaagttcatagccaaaaactgagtaaagaagcacagaagctgatgaagatgccattccagcgcgcaattaccaaaaaagagcaggctgatatgggcaagctgaagaaaagtgttcgcggactggtcgttgtgcacccaatgaccgcactgggccgcgaaatgggcctgcaggagatgactgggttttcaaagaccgcgttttaagaacacagtatctacagggtgattctgcacattcctataggccgagtaaggtgttcacgccgcatccggcaagataaggcgctctggatcaacaacctaagggcaattctctgatgaggattgcccttttctttaccagacatctccccccacaagaattggccctaccaattcttcgcttatctgacctctggttcacaatttcccaattaaaactcacatcaatgttgccaatacataacatttagttaaccattcattgtcattatccctacacaacacaattggcagtgccacttttacacaacgtgtgacaaggagatgagcaacagactcattacacgatgtgcgtggactccaggagacctgcaatgaatctctggcaacaaaactacgatcccgccgggaatatctggctttccagtctgatagcatcgcttcccatcctgtttttcttctttgcgctgattaagctcaaactgaaaggatacgtcgccgcctcgtggacggtggcaatcgcccttgccgtggctttgctgttctataaaatgccggtcgctaacgcgctggcctcggtggtttatggtttcttctacgggttgtggcccatcgcgtggatcattattgcagcggtgttcgtctataagatctcggtgaaaaccgggcagtttgacatcattcgctcgtctattctttcgataacccctgaccagcgtctgcaaatgctgatcgtcggtttctgtttcggcgcgttccttgaaggagccgcaggctttggcgcaccggtagcaattaccgccgcattgctggtcggcctgggttttaaaccgctgtacgccgccgggctgtgcctgattgttaacaccgcgccagtggcatttggtgcgatgggcattccaatcctggttgccggacaggtaacaggtatcgacagctttgagattggtcagatggtggggcggcagctaccgtttatgaccattatcgtgctgttctggatcatggcgattatggacggctggcgcggtatcaaagagacgtggcctgcggtcgtggttgcgggcggctcgtttgccatcgctcagtaccttagctctaacttcattgggccggagctgccggacattatctcttcgctggtatcactgctctgcctgacgctgttcctcaaacgctggcagccagtgcgtgtattccgttttggtgatttgggggcgtcacaggttgatatgacgctggcccacaccggttacactgcgggtcaggtgttacgtgcctggacaccgttcctgttcctgacagctaccgtaacactgtggagtatcccgccgtttaaagccctgttcgcatcgggtggcgcgctgtatgagtgggtgatcaatattccggtgccgtacctcgataaactggttgcccgtatgccgccagtggtcagcgaggctacagcctatgccgccgtgtttaagtttgactggttctctgccaccggcaccgccattctgtttgctgcactgctctcgattgtctggctgaagatgaaaccgtctgacgctatcagcaccttcggcagcacgctgaaagaactggctctgcccatctactccatcggtatggtgctggcattcgcctttatttcgaactattccggactgtcatcaacactggcgctggcactggcgcacaccggtcatgcattcaccttcttctcgccgttcctcggctggctgggggtattcctgaccgggtcggatacctcatctaacgccctgttcgccgcgctgcaagccaccgcagcacaacaaattggcgtctctgatctgttgctggttgccgccaataccaccggtggcgtcaccggtaagatgatctccccgcaatctatcgctatcgcctgtgcggcggtaggcctggtgggcaaagagtctgatttgttccgctttactgtcaaacacagcctgatcttcacctgtatagtgggcgtgatcaccacgcttcaggcttatgtcttaacgtggatgattccttaatgattgttttacccagacgcctgtcagacgaggttgccgatcgtgtgcgggcgctgattgatgaaaaaaacctggaagcgggcatgaagttgcccgctgagcgccaactggcgatgcaactcggcgtatcacgtaattcactgcgcgaggcgctggcaaaactggtgagtgaaggcgtgctgctcagtcgacgcggcggcgggacgtttattcgctggcgtcatgacacatggtcggagcaaaacatcgtccagccgctaaaaacactgatggccgatgatccggattacagtttcgatattctggaagcccgctacgccattgaagccagcaccgcatggcatgcggcaatgcgcgccacacctggcgacaaagaaaagattcagctttgctttgaagcaacgctaagtgaagacccggatatcgcctcacaagcggacgttcgttttcatctggcgattgccgaagcctcacataacatcgtgctgctgcaaaccatgcgcggtttcttcgatgtcctgcaatcctcagtgaagcatagccgtcagcggatgtatctggtgccaccggttttttcacaactgaccgaacaacatcaggctgtcattgacgccatttttgccggtgatgctgacggggcgcgtaaagcaatgatggcgcaccttagttttgttcacaccaccatgaaacgattcgatgaagatcaggctcgccacgcacggattacccgcctgcccggtgagcataatgagcattcgagggagaaaaacgcatgattatttccgcagccagcgattatcgcgccgcagcgcaacgcattctgccgccgttcctgttccactatatggatggtggtgcatattctgaatacacgctgcgccgcaacgtggaagatttgtcagaagtggcgctgcgccagcgtattctgaaaaacatgtccgacttaagcctggaaacgacgctgtttaatgagaaattgtcgatgccggtggcactggctccggtgggtttgtgtggcatgtatgcgcgtcgtggcgaagttcaggcagccaaagcggcggacgcgcatggtattccgtttactctctcgacggtttccgtttgcccgattgaagaagtcgcgccagccatcaagcgcccaatgtggttccagctttatgtactgcgcgatcgcggctttatgcgtaacgcgctggagcgagcaaaagcagcgggttgttcgacgctggttttcaccgtggatatgccgacaccgggcgcacgctaccgtgatgcgcattcaggtatgagcggcccgaacgcggcaatgcgccgctacttgcaagcggtgacacatccgcaatgggcgtgggatgtgggcctgaacggtcgtccacatgatttaggtaatatctcagcttatctcggcaaaccgaccggactggaagattacatcggctggctggggaataacttcgatccgtccatctcatggaaagaccttgaatggatccgcgatttctgggatggcccgatggtgatcaaagggatcctcgatccggaagatgcgcgcgatgcagtacgttttggtgctgatggaattgtggtttctaaccacggtggccgccagctggacggtgtactctcttccgcccgtgcactgcctgctattgcagatgcggtgaaaggtgatatagccattctggcggatagcggaattcgtaacgggcttgatgtcgtgcgtatgattgcgctcggtgccgacaccgtactgctgggtcgtgctttcttgtatgcgctggcaacagcgggccaggcgggtgtagctaacctgctaaatctgatcgaaaaagagatgaaagtggcgatgacgctgactggcgcgaaatcgatcagcgaaattacgcaagattcgctggtgcaggggctgggtaaagagttgcctgcggcactggctcccatggcgaaagggaatgcggcatagtcgtttgcgccccctcaccctaaccctctccctcagggagaggggaccgttcggcgctgtatgtactccctcactctgaaacgacaccgcactctttttttctccctcgcccctccggggagagggccggggtgaggggaaaaggccgcactgctcaccaattttctgctatcctgcccccgcactaagggggcagtatgctaaacatcgtactttacgaaccagaaattccgccaaatactggcaacatcatccgtctttgcgctaataccggctttcgtctgcatatcatcgaaccgatgggatttgcctgggacgataagcgcctgcgccgcgcggggctggactatcacgagtttaccgccgttacgcgtcatcatgactatcgcgcgttcctcgaagcagaaaatccccagcgcctgttcgccctcaccacgaaaggtacacctgctcacagcgccgtaagctatcaggatggcgattatctgatgttcggcccggaaacacgcggcctgccagcgagcattcttgatgccctgcccgctgaacaaaaaattcgcattccgatggtgccggacagccgcagcatgaatctgtccaatgcggtgtcggtagtggtgtatgaagcctggcggcagttggggtatccgggagcggtattgagagattagttactgtaggccggatagatgattacatcgcatccggcacgatcacaggacattagatcccatccccatactcaaatgtatggttaataccgttgaaatgctggtccatatccattgatggcttatcgctgtctggtttaccgacaatacgagccggaacgccagcggcggtggtatgcggcggcaccggttgcagcaccacggaacctgcgccaatcttcgcgccgcgcccaacttcaatattgccgaggattttcgcgcccgcgccaatcatcacaccttcacgaattttcgggtgacggtcaccaccagatttacccgtaccgccaagcgtcacagattgcagaatcgatacgtcgttttcaatcaccgccgtttcaccaacgacgatgcctgtcgcgtggtcaagcatgataccgcgaccaatttttgctgccgggtgaatatcgacctggaacgtcacagaaacctggttttgcagaaagattgccagtgcgcgacgcccctgattccacaaccagtgaccgatgcgataggcctgcaaggcatgaaaacccttcaggtataacaacggggttgagtatttatcgactgccgggtcgcgggtacgcaccgcctgaatatcacaggccgcagaggcgatcatttccgggtcagcggcgtaggcttcttccaccacttcacggatagcaatagcaggcataattggcgatgacagcttgttcgccagcatgtagctcagtgcactgccaaggttttcgtgcttgagtagcgtcgcgtggtaaaaactggccagcattggctcacagtccgccagcgttctggcttcggctttaatattgttccagacaatttccagttcttcacacgacattgcttactccacacgatgagataatgaccggcccgttctgcgcgggccgggtcatagcggtaacaaaggttccctggggttagtggctgctgcgctcgtccttgcgtgcacgacctagtaaagtcaatgctgcctcgcgcgcgttttttccgcaatataatacttgataaatttcctcggttattggcatttcaacgccgaagcgatgcgccagttcgcggacttctttcgtattgcggtagccttccaccacctgaccaatcttctcctgcgcgctttgtacatccatgccctgaccgagcatcatgccaaaacggcggttacgcgactggttgtcggtacaggtaagcaccagatcgccaagccccgccatgcccataaaggtggcagggtcggcacccagcgccgcaccaagacgcgacatttcagccagcccacgggtgatcagcgccgtacgcgcattcgcaccaaaaccgataccgtcggacatccccgcaccaatggcaataacgtttttcaccgcgccgccaagctgcacgccaatgaaatccggattgctgtaaacgcggaaacttttgccgcagtgcagcagctgctggagatcatcggcaaaggtctgatcggtcgaggccagcgaaatagctgtcggtaaacctgccgccagttctttcgcaaacgttgggccagagataaccgccagcggaatttgatcgcctaaggcctcacgcgccacgtcctgtaacagacgtccggtttccgcttccagccctttggtcgcccacaccagacgcgcatcaggacgcatcagtggtttaatctggcgcagcacttcaccaaagacatggctgggtacgacgacgagaatattacggctggctgccagcgcagtggcgagatcgctttcaagatggagcgtatcgggaaaaggcacatcggggagaaacgcggcgttacagcggtcgcgttcaagcgttgcgatatgttcagggtcatggccccagaggacaacctcgtggccatttcttgccagggtgatggcaagagcggtgccgtacgagccggcaccgatcacagtcattgaagcattacgttggttcatcaggcatcctgatgttcttcagtaccttcgccagcctgctgctgcaaatagttcatgaacagcgcatcgaagttaaccggcgcaaggttcagttgcgggaatgtaccgcgggataccatgctggtgatgcactcacgagcatacgggaacagaatgttcgggcagtatgctcccaggcaatgcgccatctgggtgccttcgatacccgcgatggagaaaataccgccctgctgaacttcacacaggaacgcggtttcttcgcccaaagaggccgttacggtaacacgcagtaccacttcgtatacgtcatctgccagttgggaagatgccgtatccagatcaagtttaacttctggttgccaatctttctggaaaacgtgcggcgcgttcggcgcttcgaaagagatatccttggtataaatacgttggatctggaaagtcatttcagtgttgttttgttctgacatgtgtagaaaacccttaagtgttgtccttaaatactgcgcaatgtaatgccaacgttcacacgttatttcagcaggggatccagtccaccacgtgcatccaatgcatacaagtcatcacagccgccaatgtgctgtgcgtcaataaaaatctggggaaccgtggtgcgaccgctgcgtttgatcatctcttcacgcttggcggcgttgccatcgatcggcagctcctggaaactcacgcccttgctgctcagcagtgcttttgcacgatggcaatacgggcaggtttctttggtatagatttcaacattggccataaattagctcctgtttttttaccctgaaatttcatgttgcagggcggcagcaaaatggagtgtccccagaagcttataacaataagtcgctgggggcctaattgcagctaacggcctgcatcatgaaagacgacaggtaaattatttgccgcgcaccaaaggcaagttttcgccagcccagccagcgacgccttctttcagcacgaatacttgcgcaaaaccagctttcgtcagtgcgtttgcaggctcctggcactgcatgccagaaccgtctaccacgataaccggtttgtctttgtgcttctcaagctcaccaacattgttggctttgatttcgctcggcaacagattaatagaacctgcgatatggcctttacggaagtcatcacgctgacgtaaatccacaaccacagcgtcttctttgttgatcagacgcgtagcttcaccacgagtaatcaccttcactttcgaggtcaggctcttaaacgtagtcacaagaaccgccaccagtaacgcgatccaggcgatactcagtatgggatgacggccaacaaattgcataatttcttgcatggggggtaacaactcccgacgtagtgattaaaaaaaccaggaaaggagtatacctgcgcggtgcggcaaatacagccagcgcgttaactggaatgcaattttgcggggcgcgacgaaaaaaaagcgtaaatctggcatcggcttgccgcgagcggtcgtatattttgatcttcagaggctattttatcgattcagctgtagtaaaattacgcaaattttgactcttgagtatgaggttgtcgcaatgttggtttctaaaaaacctatggtactggtgattctggatggctatggctatcgcgaagaacagcaggataacgccatttttagtgctaaaaccccggtaatggatgcactgtgggccaatcgtccgcataccctaatcgacgcttccggtctggaagtcggtctgcctgaccgtcagatgggtaactccgaagtaggccacgttaacctgggtgccggccgcatcgtgtatcaggacctgactcgtctggacgttgaaatcaaagatcgcgctttctttgctaatccggtgctgactggcgcggtagataaagcgaaaaacgcaggcaaagcggtacacattatgggtctgctctccgcaggcggcgtacacagccacgaagatcacatcatggcgatggtagaactggcagctgaacgcggcgcagaaaaaatctacctgcacgcattccttgacggtcgcgacactccgccgcgcagtgctgaatcctcgctgaaaaaattcgaagaaaaatttgccgcgctgggcaaaggccgcgtagcgtccatcattggtcgttactacgcgatggaccgcgataaccgttgggatcgcgtagaaaaagcttatgacctgctgactctggcgcagggcgagttccaggccgataccgccgttgctggtttgcaggctgcttatgctcgcgacgaaaatgatgaattcgtgaaagcgaccgttatccgtgctgaaggtcagccagacgcggcaatggaagacggcgatgcactgattttcatgaacttccgtgctgaccgcgcgcgtgaaatcactcgtgctttcgtgaacgctgatttcgatggcttcgcgcgtaagaaagtggttaacgtcgatttcgtgatgctgaccgaatacgccgctgacatcaaaactgcggttgcttacccacccgcttccctggttaacaccttcggcgagtggatggcgaaaaacgacaaaactcagttgcgtatttccgaaaccgaaaaatatgcccacgttactttcttcttcaacggtggcgtagaagagtcgttcaaaggcgaagatcgcattctgatcaactcaccgaaagtggctacctacgatctgcaaccggaaatgagctccgcagagctgaccgaaaaactggttgcggccatcaagagcggcaaatacgacaccatcatctgtaactatccgaacggcgacatggtaggtcacaccggggtgatggaagcggcggttaaagcggttgaagcgctggatcactgcgtggaagaagtcgcgaaagcggttgagtccgtgggtggacaactgctgatcaccgctgaccacggtaacgctgagcagatgcgcgatccggcaacgggtcaggcacacacggcacacaccaacctgccagttccgctgatttacgttggtgataagaacgtgaaagcggttgaaggcggcaaactttctgacatcgcgccgaccatgttgtcgctgatgggtatggaaatcccgcaagagatgactggtaagccgctgttcatcgtggaataatccctccccatgaggggaaaggcgattaataccatgacacgggccgtgaaaccgcgcaggtttgcaatcaggcccatcatctacgccagcgttcttagcgctggcgtattgttgtgcgccttttccgcccacgcggatgagcgtgaccaactcaaatctattcaggctgacatcgccgcaaaagagcgcgcggtacgccaaaagcaacaacaacgcgcaagcctgctcgcacaattgaaaaagcaggaagaagcgatctctgaagccacccgtaagctgcgcgaaacgcaaaacacgctcaatcaactcaataaacagattgatgagatgaacgcgtcgattgccaaactggagcagcaaaaagccgcccaggagcgcagcctcgccgcacaactggatgccgcattccgtcagggcgagcataccggtattcagctgattctcagcggtgaagaaagccagcgtggacagcgtttacaggcttatttcggctatctcaaccaggcgcgacaagaaaccattgcccagttgaagcaaacgcgtgaagaagtcgccatgcagcgtgctgaactggaagagaaacagagcgagcaacaaacgctgttatatgagcagcgcgcccaacaggcgaaactgactcaggcgctgaacgagcgtaaaaagacgctggcagggctggagtcttccatccagcaaggtcagcaacagttgagcgagctgcgcgccaacgaatcccgtctgcgtaacagcattgcccgtgcggaagccgcggcgaaagcgcgtgcagaacgagaagcacgtgaggcccaggcggttcgcgaccgccagaaagaagcgacgcgcaaaggcaccacctacaaaccgaccgaaagcgaaaaatcgctgatgtcccgtaccggtggtctgggcgcgccgcgtggtcaggcattctggccggttcgcgggccgacgctgcatcgctatggcgaacagctacagggtgaattacgctggaaaggtatggttatcggtgcttctgaaggtactgaagttaaagcgattgccgacggtcgggtgattctggctgactggctgcaaggctacggtctggtggtggtggttgagcatggtaaaggcgacatgagtctttacggctataatcagagcgcactggtgagcgttggttcgcaggttcgcgcgggccagccgattgcactggtgggcagcagtggcggtcagggtcggccttcactctatttcgaaattcgccgccagggtcaggcggtcaatccacagccgtggttgggaagataagttttgtttccatttcgtcgtaacgttcttgcatttgccgctctgttggcgctctcctcccccgtacttgctggcaaacttgccatcgtcattgatgattttgggtatcgcccgcacaacgaaaaccaggtgctggcgatgccttccgctatctccgtcgctgtattacccgattcaccgcacgccagagagatggcgaccaaagcgcataacagcgggcacgaagtgttgattcatctcccgatggcaccgttgagtaaacagccgctggagaaaaatacgctacgcccggagatgagcagcgacgaaattgagcgcattattcgtagtgcggtcaataacgtgccctatgccgtggggatcaacaaccacatgggcagcaagatgacctctaacctgtttggtatgcagaaagtgatgcaggcgctggagcgttacaatctttacttcctcgacagcgtaaccatcggtaatacccaggcgatgcgcgccgcgcaaggcactggcgtgaaggtgatcaaacggaaggtattcctcgacgattcgcaaaatgaagcggacatccgtgtgcaatttaatcgcgcaattgacctggcgcgtcgcaacggttcgaccattgccattgggcatcctcaccctgcaacggtacgcgtgttgcaacagatggtttataacctgccgccagacattacgctggtgaaagccagcagcttgctgaatgaaccgcaggttgatacttctacaccgccgaaaaacgctgtgcctgatgcaccgcgtaatccgttccgtggcgtgaagctgtgcaaaccgaagaaaccgatagaacctgtttatgctaatcgcttctttgaagtattaagcgaaagcatcagccagagcacgctgatcgtttacttccagcatcagtggcaaggctggggcaaacagcccgaagcggcgaagtttaacgctagcgcaaattaaaggcgctacgcgtaatgcgatggtgcgaccgcgttttgtcgcgccattgccataagcggaaagaccacagtaacgcctggtaaccgaccttcacgctgcgcacattggtaatcaggcgcttatacataccggaagtaaatatctcggcaatcatccgttggcgggtaagaatatccggctctttgcgcaccgcatggcaaacacgcaatgcctcgtaagttatttgctgatgaaattccggataaatcataattttgtcggcataatttcgatttaatttctccagcaggcgggtaatcttaatatagtgacgttgataattaaggtttttattcccttgtctatgcaaccgactcactgacgtattatgcagataatatttatataatgattgctcggtatatcgcgcacgcagcgcgttaaacatgaattctgttgtccagacaatatcctgatgatgtaatccggcaataaatttaatgttatttttaacaataacatcacggcgataaacccccatccagacaacgtgagtccaacggcgcgaagaaagccccatccgcagccagtccgggccggttaatacgccggttgagcgaaggcgatcggtggggatggattgccaggtttctcccgtttcacgaaaacaccagtcagcgttgcactgcgccacgtcgaggtcgtcctctaacgccatggtcatcagcgtttcgtacatggtgggatagacttcatcgtcagcatcgacaaaagcgacatatttgcccgttgccacttcaatcccacgattacgcgccaccgatgcgccagcattcgcctgatgcaacaaacgaacgtgcggatagttttctgcgtaatactttgctatttcaacagaattatccgttgaaccatcgttaataataatgatttccagagcagtccaggtttgcgtaattaaagattccatacaagtgcggaaatcatcgcccgcattatataacggaataataacactaagtttattggtgctgttcatcataaattaccgacgacctctgaagttatcctgacgttttacaggctttgtattaagaaactattaagcctgtgagatattatttttacaggtgagagagtcacttcagggtagagagataatgagagcagctatataagagatcagcacaattacgaactctttattacactgacaggattttacatatttaacagattatcctcagataaaagggctggaataccagcccttgttcgtgttaatcccagctcagaataactttcccggactggcccgaacgcatagcgtcaaagcccttctggaaatcatcgatagagaaacgatgggtaatgatcggcgaaagatcgaggccagactgaatcagcgccgccatcttgtaccaggtttcaaacatctcacgaccgtaaatacctttaatgaacaagcctttaaagatcactttggtccagtcgatagacatatcagacggcggaatacccagcatcgcaatacggccgccgtgattcatggtgtcaagcatggtacgaaacgctggcggcgcaccggacatttccagaccgacatcaaaaccttcggtcatgcctaactccgccatcacgtcattgagattttctttggcgacgttaaccgcacgggtgatacccattttacgcgccagctcaaggcggtattcgttaacatcagtgatcaccacattgcgtgcaccaacgtgtttcgccaccgccgctgccataataccaatcgggcctgcaccagaaaccagcacatcttcgcccaccagatcaaacgacagcgcggtatgcacggcgttaccgaagggatcaaaaattgcggctaagtcatcggaaatattgtcggggattttgaaggcgttgaatgccgggatcaccagatattcggcaaagcagcccgggcgattaacaccaacgcctatcgtgttgcggcacaaatgggtacgaccaccacgacagttgcggcaatgaccacaggtgatatggccttcgccagaaacgcgatcgccgatcttgaagcctttcacttcctgaccaatacctaccacttcaccgacatattcatggcccacgaccatcggcaccgggatggttttttgcgaccactcatcccagttatagatgtgaacgtcagtcccgcagatggctgttttacggattttaatcagcagatcgttatgcccgagttccggtacaggaacgtcggtcatccagatgccctcttccgctttcagtttggataacgctttcatctcacatcctcaggcgataacgcccagttgtttaccaatacgcgtaaatgcttctactgcacgcgtaatttgctcaggggtatgcgccgcagacatctgggtacgaatacgcgcctgacctttcggaacgaccggatagaagaaaccggtaacgtaaatgccctctttttgcagctcacgggcaaatttctgcgccactaccgcatcaccaagcatgaccggaataatggcgtgatcggctcccgccagggtaaagcccgccgccgacatttgctcacggaactgacgcgcgttcgcccacagacggtcacgcagttcgctgcccgcttcgaccatctccagtactttgatggacgcggcaacaatggccggtgccagcgagttggagaacaggtacggacgagaacgctggcgcagccactcaaccacttctttgcgcgccgcggtataaccaccagaagccccgcccagcgctttaccaagcgtaccggtgataatatcgacccggcccatcacatcgcagtattcatgggaaccacgaccattttcaccgacaaaaccgaccgcgtgggagtcgtctaccatcaccagggcatcatatttatctgccagatcgcaaacgcccttcaggttggcaatcacgccgtccattgagaacacaccatcggtggcgatcagcacatgacgcgcaccggcttcacgcgcttctttcagacgtgcttccagctcctgcatatcgttgttggcatagcgatagcgtttagctttgcacagacgcacaccatcaataatagacgcgtggttcagtgcgtcggagataatggcgtcttccgcacccagaagcgtttcaaacaggccaccgttagcatcaaagcaggaagagtagagaatcgcatcttccatccccaggaaggccgccagtttttgttcaagctctttatggctgtcctgagtgccgcaaataaaacgcaccgaagccatgccgaaaccgtgagaatccattcccgcctttgccgccgcaatcagatcaggatgattcgccagcccgagatagttgttggcacaaaagttaatgacgtggcttccatcagccacagtgatatctgcttgctgcgcagacgtaataatgcgctcttctttaaacaacccttccgcccgtgcggtttccagatcgttggttaactgctgataaaattctccacgcattgcgattctccagacagggcaaattccagcacatattacccaaacttataggtcgcgacgagataacgcgttaacacttctgcaaaattcaggataaataacgtgtaacttgatgtctctcaacacctacagatagtagaaaaactgtacagttttggctgggcataatgatgattgattttactgcattgatataaaaagaaaaaatgatgccaaagcatcatttttcctatctcagttggtatcaaaacgctacccactaatggagggaaacctattttcttgaaaggaaaattctcagcgcctgcatttttgcccctaaagtgttactcctgaagcagcgaaacaaatcgaaccattttcctctccccagatagtttaggttgaagagatcggggcgtttgtaatagcacatgacaaaaatgccctggtcatcgtccacaatgttattatttagtgttattttttgactttccagaactaatttatagaattctttccatttatgctgtgaaccaacaattgcgcccccaataatatatacatgattgccaatcatgaaatcaaaaacctgttgttgagatgtgacagtaagccctttttttatagtgaaaagatgcatcttactttcatcaaatgggaaatcccaaattttcaatcctcgagttacatttggcttatggcaatagccaaaatctatccacgcaacaagaggcgttttcactaagcccatgttgatagctttatttacaaaataggccttaaggttacataccaaaacatactctggtgaccagtactctgggttttttaattgtcgaggctcaagtctatttgtaaacgactcatctttttgaattttttcgatacgacttctgatatatctaaatttcttttttatatcgataacgataaccgttgttggttttccgttgcgaatcgcttcaacccttggtttcaaatcgggagaagtgaaaataatcatctcattttcaagtgcggccagacgctcaaagtaactaaaataaacatcaactgaacgagctagtttttcacggaaccctttattagcagtccaatcccctctaccaatgtcaaaatatgcagtgataattgtggtggatgatttcattactaataagaccattaatataaaaaaagaattatatcataaatattaatagaatgtatactgtatattatccattcaaatgcttccgttatttatcatacatcggaatattgatactaaagcactattcacatgcaaaaccaacatccgccatgaaggactagctaaaacccaaactagtttgttgcaattagcatccttgcacctctatgtaaagggctgaagggattcggatgtgatggtatgattacagacattcgtgtctgagattgtctctgactccataattcgaaggttacagttatgatcatcgttaccggcggcgcgggctttatcggcagcaacatcgttaaagccctgaatgataaaggcatcaccgatattctggtggtggacaacctgaaagacggcaccaagtttgtgaacctggtggatctgaatatcgcagactatatggataaggaagacttcctgatccagattatggctggcgaagagttcggcgatgtcgaagcgattttccacgaaggcgcgtgctcttccaccaccgagtgggacggcaagtatatgatggataacaactatcaatactccaaggagctgctgcactactgcctggagcgtgaaatcccgttcctgtacgcttcttccgcagccacctacggcggacgcacctccgactttattgaatcccgcgagtacgaaaaaccgttgaacgtctacggttactcaaaattcctgtttgatgaatatgttcgtcaaatcctgcctgaagcgaactcgcagattgttggcttccgttatttcaacgtttatggaccgcgtgaaggccataaaggcagcatggcgagcgtcgctttccatctcaacacccagcttaacaacggtgaatcaccgaagctgtttgaaggtagcgagaacttcaaacgcgacttcgtctatgtgggcgacgtggctgatgtgaatctgtggttcctggaaaatggcgtttccggcatcttcaatctcggtactggtcgtgcggaatccttccaggcggtagctgatgctacgctggcttatcacaagaaaggccagatcgaatacattccgttcccggataaactgaaaggccgctatcaggcgttcactcaggcagatctgacaaatctgcgcgcggcgggttacgacaaaccgttcaaaaccgttgctgaaggtgtaacggaatacatggcctggctgaatcgcgacgcataagagctctgcatgaaaatactggtgatcggcccgtcttgggttggcgacatgatgatgtcgcaaagtctctatcgcacgctccaggcgcgctatccccaggcgataatcgatgtgatggcaccggcatggtgccgtccattattatcgcggatgccggaagttaacgaagctattcctatgcctctcggtcacggagcgctggaaatcggcgaacgccgcaaactgggtcatagcctgcgtgaaaagcgctacgaccgcgcctacgtcttacccaactccttcaaatctgcattagtgcctttcttcgcgggtattcctcatcgcaccggctggcgcggcgagatgcgctacggtttactcaacgatgtacgcgtgctcgataaagaagcctggccgctaatggtggaacgctatatagcgctggcctatgacaaaggcattatgcgcacagcacaagatctgccgcagccattgttatggccgcagttgcaggtgagcgaaggtgaaaaatcatatacctgtaatcaattttcgctttcatcagaacgtccgatgattggtttttgcccgggtgcggagtttggtccggcaaaacgctggccacactaccactatgcggagctggcaaagcagctgattgatgaaggttatcaggtggttctgtttggctcggcgaaagatcatgaagcgggcaatgagattcttgccgctttgaataccgagcagcaggcatggtgtcggaacctggcgggggaaacacagcttgatcaagcggttatcctgattgcagcctgtaaagccattgtcactaacgattctggcctgatgcatgttgcggcggcgctcaatcgtccgctggttgccctgtatggtccgagtagcccggacttcacaccgccgctatcccataaagcgcgcgtgatccgtttgattaccggctatcacaaagtgcgtaaaggtgacgctgcggagggttatcaccagagcttaatcgacattactccccagcgcgtactggaagaactcaacgcgctattgttacaagaggaagcctgacggatgcgggttttgatcgttaaaacatcgtcgatgggcgatgttctccatacgttgcccgcactcactgatgcccagcaggcaatcccagggattaagtttgactgggtggtggaagaagggttcgcacagattccttcctggcacgctgccgttgagcgagttattcctgtggcaatacgtcgctggcgtaaagcctggttctcggcccccataaaagcggaacgcaaagcgtttcgtgaagcgctacaagcagagaactatgacgcagttatcgacgctcaggggctggtaaaaagcgcggcgctggtgacgcgtctggcgcatggcgtaaagcatggcatggactggcaaaccgctcgcgaacctttagccagcctgttttacaatcgtaagcatcatattgcaaaacagcagcacgccgtagaacgcacccgcgaactgtttgccaaaagtttgggctatagcaaaccgcaaacccagggcgattatgctatcgcacagcattttctgacgaacctgcctacagatgctggcgaatatgccgtatttcttcatgcgacgacccgtgatgataaacactggccggaagaacactggcgagaattgattggtttactggctgattcaggaatacggattaaacttccgtggggcgcgccgcatgaggaagaacgggcgaaacgactggcggaaggatttgcttatgttgaagtattgccgaagatgagtctggaaggcgttgcccgcgtgctggccggggctaaatttgtagtgtcggtggatacggggttaagccatttaacggcggcactggatagacccaatatcacggtttatggaccaaccgatccgggattaattggtgggtatgggaagaatcagatggtatgtagggctccaagagaaaatttaattaacctcaacagtcaagcagttttggaaaagttatcatcattataaaggtaaaacatgctaacatcctttaaacttcattcattgaaaccttacactctgaaatcatcaatgattttagagataataacttatatattatgttttttttcaatgataattgcattcgtcgataatactttcagcataaaaatatataatatcactgctatagtttgcttattgtcactaattttacgtggcagacaagaaaattataatataaaaaaccttattcttcccctttctatatttttaataggcttgcttgatttaatttggtattctgcgtttaaagtagataattcgccatttcgtgctacttaccatagttatttaaatactgccaaaatatttatatttggttcttttattgttttcttgacactaactagccagctaaaatcaaaaaaagagagtgtattatacactttgtattctctgtcatttctaattgctggatatgcaatgtatattaatagcattcatgaaaatgaccgcatttcttttggtgtaggaacggcaacaggagcagcatattcaacaatgctaatagggatagttagtggcgttgcgattctttatactaagaaaaatcatccttttttatttttattaaatagttgcgcggtactttatgttctggcgctaacacaaaccagagcaaccctactcctgttccctataatttgtgttgctgcattaatagcttattataataaatcacccaagaaattcacttcctctattgttctactaattgctatattagctagcattgttattatatttaataaaccaatacagaatcgctataatgaagcattaaatgacttaaacagttataccaatgctaatagtgttacttccctaggtgcaagactggcaatgtacgaaattggtttaaatatattcataaagtcacctttttcatttagatcagcagagtcacgcgctgaaagtatgaatttgttagttgcagaacacaataggctaagaggggcattggagttttctaacgtacatctacataatgagataattgaagcagggtcactgaaaggtctgatgggaattttttccacacttttcctctatttttcactattttatatagcatataaaaaacgagctttgggtttgttgatattaacgcttggcattgtggggattggactcagtgatgtgatcatatgggcacgcagcattccaattatcattatatccgctatagtcctcttactcgtcattaataatcgtaacaatacaattaattaagaataaacaagtttaagaagtgagttaaaactcacttcttatctatacaacttaatctctttactgaattagttaaagtttcagtatcgatatcttttaccgtatatgttggggatactatttgtatagatttatgatgattcggggaccaaattaaatgcgagggatattccggagtacgtgaattagggtaaaatgcaagcgttggtttatgataagccgcagcgatatgaacaagagctgtatcaacagaaatgacaaaatcactatacttggtcaacgcaacggtataaataaactcatcaaatggtagtgtttcgatttcaagtattggtattgtcaataaatcttgcggtaacccggtaaatataatccgataattttcaaagtgtgttttcacttcttgatatataacttttatttgctcaaacgtaagacggcatattttttttgcacctaatggattaataatgactattcttgtatctccaataaattcttttattttatcttcaacatctactggtaaatgcaagtcgtagttggtggaaaatttaccctcaccataaatatgcttcagtatttctattgctcgtgtactcatatgttcttttaaacattcatcgtggggatggtaaaatgaatagtaacgcttataccaatgatcaaaacccagaatgtaagaatcttttaaacttgataatattaagctatgcttaaatgagggcatagtttcaaaggggtctaatacaatatcgaactgtaaatcccgcagatgcttacatagagtaagcatttcaagaaaaccggttgattctttaatacagaactcaaatatatttttattattagagagaaattccccaccctttctatttgtgagaagagttattttaacccctttactataaagttcacgataaatcgaacttaatacaattagatcaccaagtttattattatcatgaataataaggcatgatttaacttgtgctggatctgtaatttgattatttattttattacgaaataaaaaagaaaggaaattaatcttgattttgtttatataaaatcttttctttttgtgaaaagttcctaagcgcatttttataccatattattttagtttcaggatgattaattagcataagaatcggttgaagttctatattgcattttttttcttgtcatatcttttgattcttctgcactgatgtcttgaagtttaataaatggaattacatcgtaagaaatagctgtatcatctgataaattataaatattaatatcttttacattatcatgcataaaacgaaaaaatggcaatattttgaataaatccctacttaattccgagggcatgggatttttattctcatcatagaaacgagaacagctacccgttaaatcaagaccagaacaaataatccgcgcatacttaagtgaatatgcgatttgaattgcagcaaaggcaatagtatggcatgagcaataaccaagactaatgtccttgcaaaatccaaccagacgaccttttttagacaacggtacagagatcagcagttctttgtgaatctgtctcaaaatattaaatttaatcttctttataaaaccacctttttcccgacggtaaaaggaccgtaatacgaggcagttctggaggatataaagtttatcttctttggaagcgtgttcataaacgtcaacgtttactatggtataacgacttctctggctaaatttataaaaatcatcacgacgctgatgtaaaaatcggacatctgtaagtacatatataaaaggaacgatattattacttaacagatattgcgcagaaccattgacagcaataatatcctttgttcgtaatactgacaaaggtgttttttgcgatgtagggcccgaaagaaaaataataacatcatcagatattttattttcaatcaggttttcaacatcttttttgtcaatgtatctaatattcttcatgataaacctgtgaaataaataactccgcttaaaactgtcctggtgaagacatgtaattgtgggattttttttagcgcgctggtttccctttcaaacgccgcataaaattgcgcatttttttacgatatactaaaagataatagcctagatctctaatctcatttttaataccgtaatgacgctctaagtcaatacgatctttcgctttacgctgcgctgaagcacgctttccggagagatcgataattcgaacctcaccattttttataatgaagttaccacgatgggggtcgccagaaaccatgccatgttgatgtaaggcattaattgattgctgaattttattttttagcgcatcatcaatatcgggcatatcacacaactctatgccatcaatatactcgatgatcatgatataagtatggacaaaacgtaaggttttccgttcagccaataaataaaagtcattgagtgtatttaacccttcatttcgtactttttgggtttgctcaaaaaggcgttcgtaataatcaccttttaacagagacttaaagaaacgttcgttacgcttaactttcggagaaaaaaccttaagaatcaatttaccgtaatcggtatcaataagcataacttttgtatcatcaatagaacgaaaaaccttgatgatatttatattataagacaagaagtcatttaatacattgaggtactttgaattgttttcatcggtaaaaacaaccaagtctttgatcttgctcttctgaatcataataaaccagttaaatgttatttacggtaatattttcggcaaagataacagactcctgctataattcctgagatataatgatgttgcactaaaagatgtttatatctttttttaaattcaataattgatttcgcatctcgtggagagtcatctttccagggggaattttctaaagctattttatagtattttaccgatggataaattgcccatttgtgccacggtttagttgcacctgtataatgaataagaagagtactttctgtaatcagctttttatagttttgatgtgttttgtcttttaattcacttttaattgtataaattgtattgtactcacgaggcaaaaataatgtcatccctttcagtaagacattcataacatcctgatcagggtatttataaacattatctttactcataagaatagacaacgctttttctgttagttttgcgtcagcccatttttttaagtctaaataaacgacaccggaattaaagtactgcccaagtaattcaggatcagacaacctggataccgccttttcttgcattggctcaacatctttaacaacagcagcaaccgctccatttaaacccagatgtaatagttggctaatatcgcctttacaaacaacatctgcatcaagataaagcaaacgatcaagcgttaaacccaataattgaaatgcaaataaacggaagtacattgctcttgaccagacctgtgtacaaggcaagcactggagcttatcagtgttaattctatataacgtgattcttaattggttttgctctgcaagctttgcaattttttgaaaaaaaccatcattataaacatcagcaataatataaaaatcaagattaatatgtcgattatttaggacaattgatgtgatggaaacacctacaccatcaagataattagcatcgacaccataggcaacatttaaacattcagaagtatttatattagctagccgaaaatcccaggctttaactttatctatctctatggcaggaaatgagtccacaatgctacccttatatcattactttatagtttcccagttttaatgctttatcttttcaataaaataaaaaagatagttgctaaatccttttagatatctatgctttttaagcatatgttttgcgctatatcttaattgattgctattgttcggtttcagcaacgccgtattcttccatggcgaagcattttttgcctccataaaggcttgtgatacaggataatcccaggcccaatcatgccagggcttggttggcccgatataatggataaaaatagtatcgttggttactgggtttataaagctttctttgagttgataatttaagctgaactgggtgttatatttaatatcagcgaaaataagtttatccgccagcaacatatttaacacatcctgatcaggatgtgttatttttttgattatttctggctcatttagcattgcaatagctcgtgcagaaacctgctgagccgcccattgggcagtattaatcaataaaaaaccggagttaaagtaacctttagcaattcccgcaacacctaacgaatgggcgcgtttttcccaccagtcagcttgcccttctgtaacaaccattgcgactttatcgtcaggaaatgagaaattaattagtggctcaatagtcccctgacaaatgatatctgcatccagataaaggactttaggcgccttattaataaagtaatctgcaataacaaaacgaaaatatattgcatgagtccaattcttagtgctaggcaatgagcgcagtcgatcaccattaatcagatatattttaattctggttttatactgcaacgccagggcatcaaaatacttacgatcatcatcaccaaaataatcagtaaaaatatggaaacacaatcgacttccttcattatattttaatattgaagcaatcgaaattccgcaaccaaatagaaagtttttgtcagttccataagcgatgtccagacaaagattttctgtttctactttatgatcataatcaataactgaattaagaaactcagtttcctggaaaaacacctgctgcattatttcctccgggaaatagcagaaataattaccttatgtaatctatcgtaatacttcgattggtaaaattcatcgatcgacgcaggaattttttcatgttcgatatgaatttcacctgctatatatttatttagaagagttacaaaaccagcaatatctcccggttgatacagatggccattgacatcaggttgaataatgtcagcaggcccggagacacaatcggcactgatacaaggaatcccccacgacaaggcttcaagtagggtcattgggaaaccttcaaaagatgacgtgagcaataacgcactcactttttcaatatcttgctggaccaattcccagggatattgttgccaaccataccagacaattcgatcatcaatatttaattctctaccataagcctggcatttttcgaaatcggagccatcacccaatacatggagtttccagttacctttcgcttgtgataagccatcaagcaggtctttaactcttttctggccttcaaatttcatacgcccaacataaataaacgttgccgtttcaccttcctcgggcgcgggaatgactgagtctttagtttcgacgggattaaaaataacatttatcgtcgattctgctacacctcgattaatcatttgctgtttaatgccagagctgattgctaaatgatagtcggcacaggtgatatattcagcatgttttttgtgatctaaagaaaaatgtggccatgaaaatactggcatatcaattcctgattttttacgtgcttttgcggcaaacaggcaggagatcacatcaatacaaataacgatatctggttggtactcctgaagccatttacttagagcatgaatatgtttcgcccgacgcaaaaaacctaaacgaatattggaaaatgaacatgagtatttaataccttccagccatcccttatccattttgtcattacgacaaaagaaaaacatttcactttggatatgttgttgcctgaaggtagtaataacatcacggatgacagtttccatgccgccaaatccagaaacagcttcgccgataaacgctattttcatagaaactctcattaattgagtaaaactcactgttttaacggttttatttgtctataaaatcagaaacaatcgttgacatcattttatctggactgaatttatataaactatcataatccattggtttaacagatgagttaataaaatactctaacttatcccaatcatcatgacctattataaaaaagcgagattcactatagatttctgaaccaaatacatttatattattagtaattaattttttattgaaaaatagtgcctcaagtatacgaagagtccagccagattggttttctttggttatatcaacaattatattagcatttaatgttcttctaatattctcttcataagatatttgtttttcaatcaaatactttgaagtcgtagatgatgtcttatctttgacaacattaaaatctagcttacatcctagtgttgttaatctctcggctaactcattaattatttgaagacgccctttatcacgaccaaggaaaaaacatattggctggctgttatttttgtcagataaactataatttctaatttcatccattcctataggaaaaaattgttctattgccttgatcttttcattccctataaatctatgctcaaaatcatatataatatcgaaataattcgcgttatcaagaataaaatcttcgccaacagtatttcttagaagcaaaactttatgacagttaatattttttaatatttgtttattgatacctttattaacaacactgtcattaatgataattatgtcatcttttttaatatcattgaggtaatgcttgatgaataatcgccccagccatgcattatccatccctatttttgatatttttttattaatccagttatatttttttggtgttgttatattttttatcttgtacttttttttcaggtactgaatcatttttaattcataatctgcaacccaatttataaaataaatagtcataataaagttagttccagtacatactaataaatatttttataatcctttgcgttgtgttcgctctttaatacgctcggccttaacgcttgccatgttcaataaattctgttcaagagacaatattttgcgtaaaggcatcccaaaataaaccttcataaatcgccagatatctctttgcgtcaggccaatattcattgatgagaaatataaaccaatcaggtctttatcgcgccagcggcgcggtacttttgcacgtatctgtgcccgatgcagatcgataactgaaatttttaattcatcttcccggccagtaaatggcaaatgaagcaaaaagtggcaaatgtaacagtcgcggtgatttatccctgcagtatgcattttacgcaccatagttgctacacgtgcgatcagcatacgcttaacacgtatatcaggcgggttgactgcccaatcggcacaataatcttcaaggctaattgtgggagtgagatcttcggtaataataaatgatgcgcgagttaatggatttaaccctttttcgccaaacccaatgcccttcattgtatcaacgccaacatcactcaggcgatgaatagcgtgccactctctgtctgcgcccaaaacgggcatccgcaatgagagtagattttttataatctcttttaatgtcgtccccttgtgccatttaagaaaatagcttttcccggacagttcaaagcgtaatgtacgacgagtctccagttcacgaaagacctcgccgttcagttttttgacctctgcaaaagcatctttaccacgccaaagtgtggcaagcggctcttttaattcaaccatctaaaccacctgtaatgatatccgcggctttttctggcaagctatacaaatcctgagtatcggcataatggcgagcattctccgcccaggccattcgcaatggcgactgagttaacgctttacgtaaaacttcatttaattgttcctgagagaaaggttcagcgatgaccgttccacaattggcatccgcaatataatgcgcgtacccacataccgctgttgttaaaacaggtaacccagcagtgatcgcttctagaagaacgatacccgcggcttcctgataagcgggatgcagtaataaatcagcggctgccattaattctgacacatcattgcgaccggagaagaaatgcacattgctccgcacgccgagtttttctgccagcgcttcaaattttcgcggcttatcctgaccaacaacaaataaaagcgtattgtgacgtaatgattccggtaacgatgccaaagcttcaattgagcgatctacacctttacggccaaaatctgatccaacctgcagtaataagttttgttgctcttttatgccatttttctggcgataaatttcacggctgtttgggatttgctcactgtattttctgtccggataaataccgggaggaagaatttgaaaacgttcaggttcagtttgataatgcttctggaaatcggcgatttgcttatcggtcagcatcataagtttcgtcgatttaccctgctcgaaagtcgctcgctcaaatgcggcataatggcgatatcgtgatgttaaacgatataaaaaacctttttcttgcgcaactttctcggcgtaacaaacatcagcggcaaaataaacatccaggccaggcatcttattaaacccaacaacgcgatctgcgggatgctctttgagatgattttgtacccaggcataatattctgcattgcgtccatggttggtatgggacttaactggcacctgaataagctcaaatgctttcgggcaatcgccttcccacgactgtgtatatacccgaacatggtggccccgtgcggcaactgttgatgcaatgcgcataaagtcacgttgaagcccaccaaatggaaaatatttatataaacaaaacgccacgatcataattgtgcattcctgtcagctgaaggggcatcttctggcaacagcttttccgtagcggcgatcacatcctccgctgggataacagaaagatattttttgttgcggtcaagttcatgccgggtcggcattttctgataattccccgcccagaattgaataatattctcggtccagggacgccagaatacgtgatccgttgcaccaaatagactaatgactggcgttttcactgccgctgcaatatgtcccggcgcagaatccacaccaataaaaagcactgcatgatcaattaatgcacccagttcaggaaaacgtgttttacctgcaaggccagtaatgggttttgtttcgcaacctcgtgcaatctcatctacacaagcgagatcatctgccgagggcccacaggttagcacaacctgatagcctcgctgttgcagcgcatcgataaccttagaaaatttatcgttatcccaacacttaaatatctgacgcgctgtcggttggatgacaacataatgatcttttacgcccagggcatctaattcccggcgcatcttcttccagcaatcttcggcgtaactcattgttgtgtcggtgtagaaatcggtaatacctaatggctcaaggaccgataaattacgctcaacaatatgtgtaccgtgtattggcgctaagtgtgtgaagctttttttccaaataccatgctgccgatgaccataaagttgcgatattttcatccgtgcaggtaaacaacgtaccagcagcgccaccatccactgatccgtaagattaatgaccaggtcataattattcgcacgcagagtttttatcaacgaaagcacatttttaattttatcgaaagttcccgcacctttattgcttatcccatagagcgcattaatttccgggttttcagacaaaatagggatggtgtcctgataaagcagcatatcgatttttgcatcaggataattctgcttgagcgtactgatgacaggagtagttaataacatatccccatgatatcgcatctttatgaccaggatttttcgaaatggcttttccactagcgactcttttgtgtgattgtctggttaagttaagcagaaaaaagcacgctaccgccccaggctcaacagctacctgaatactgataacgcacttactttgacgtgctagtgtatcatttctttcgcagcaatccgacccgaatgatttttatacacaaaatatactttaatcataaaaatcaaatagataaaaaatagcatttcgataatgtcagtacggcctatgtagatttgaaaatggggccgagtttcaatgaatcgcataaaaatacaaaaaaaatgaagatgtagcggcagatcagaccaaactgaagctatttaagtcaaaaacgggaaaagtaatggtaaagccacagctaaatacatagaatccccagcacatccataagtcagctatttactatgctcgaattgctttacaccgcccttctctaccttattcagccgctgatctggatacggctctgggtgcgcggacgtaaggctccggcctatcgaaaacgctggggtgaacgttacggtttttaccgccatccgctaaaaccaggcggcattatgctgcactccgtctccgtcggtgaaactctggcggcaatcccgttggtgcgcgcgctgcgtcatcgttatcctgatttaccgattaccgtaacaaccatgacgccaaccggttcggagcgcgtacaatcggctttcgggaaggatgttcagcacgtttatctgccgtatgatctgcccgatgcactcaaccgtttcctgaataaagtcgaccctaaactggtgttgattatggaaaccgaactatggcctaacctgattgcggcgctacataaacgtaaaattccgctggtgatcgctaacgcgcgactctctgcccgctcggccgcaggttatgccaaactgggtaaattcgtccgtcgcttgctgcgtcgtattacgctgattgctgcgcaaaatgaagaagatggtgcacgttttgtggcgctgggcgcaaaaaataatcaggtgaccgttaccggtagcctgaaattcgatatttctgtaacgccgcagttggctgctaaagccgtgacgctgcgccgccagtgggcaccacaccgcccggtatggattgccaccagcactcacgaaggcgaagagagtgtggtgatcgccgcacatcaggcattgttacagcaattcccgaatttattgctcatcctggtaccccgtcatccggaacgcttcccggatgcgattaaccttgtccgccaggctggactaagctatatcacacgctcttcaggggaagtcccctccaccagcacgcaggttgtggttggcgatacgatgggcgagttgatgttactgtatggcattgccgatctcgcctttgttggcggttcactggttgaacgtggtgggcataatccgctggaagctgccgcacacgctattccggtattgatggggccgcatacttttaactttaaagacatttgcgcgcggctggagcaggcaagcgggctgattaccgttaccgatgccactacgcttgcaaaagaggtttcctctttactcaccgacgccgattaccgtagtttctatggccgtcatgccgttgaagtactgtatcaaaaccagggcgcgctacagcgtctgcttcaactgctggaaccttacctgccaccgaaaacgcattgaggttgttatgcaaaaacgggcgatttatccgggtactttcgatcccattaccaatggtcatatcgatatcgtgacgcgcgccacgcagatgttcgatcacgttattctggcgattgccgccagccccagtaaaaaaccgatgtttaccctggaagagcgtgtggcactggcacagcaggcaaccgcgcatctggggaacgtggaagtggtcgggtttagtgatttaatggcgaacttcgcccgtaatcaacacgctacggtgctgattcgtggcctgcgtgcggtggcagattttgaatatgaaatgcagctggcgcatatgaatcgccacttaatgccggaactggaaagtgtgtttctgatgccgtcgaaagagtggtcgtttatctcttcatcgttggtgaaagaggtggcgcgccatcagggcgatgtcacccatttcctgccggagaatgtccatcaggcgctgatggcgaagttagcgtagcgtttatgccggatggtatgccatccggcgcgcatgaattacttctggcactgccgacaataaaacgttgcccgctgcgcatgtttagtcgccacaatcggcgtaccgcacacccgacacggctcaccttttcgcccgtaaacctgcaattcctgagcgaaatagcccggtttaccatcactttgcagaaaatctttcagcgttgtaccaccctgctcaatcgaacgcagcaacaccgctttaatcacccgagctaacaattcacactctgccagcgacagtgatgacgccagccgatccggatggatccccgccgcaaacagtgattcgctggcatagatattccctacccctaccaccagcttgttatccatcagccacggtttaatcgccgtttttttcttcgcgcacttctgatgcagatactcaccattgaaatcgtcgctaagcggctccggtccaagatgggtcagcacattatgcccttccagctctttggtccacagccaggcaccaaagcggcgcggatcggtgtagcgcagcactttgccgttgctcatcaccaaatccacatggtcatgcttttcagggggaagttcttctggaaggatgcgcaggctgccagacatccctaaatgaatgataatccagccctcaggcagctccagcagcagatatttagcccgccgctgcacgctaagcactggttggtcgcttaaacggtagatctcttctgaaaccggccagcgcaagcgtccgttgcgcaccactgcatgaagaatggttgcaccaacgagatgcggttctatgccgcggcggctggtttcaacttcgggtaattcaggcatagcatctccaggaatgaacagatgcagtcaatatgggggcaagcagataacaaaaaaccccgccggagcgaggttttttgttacatcaaagcgagaattatttgattttcgcttctttgtagatcacgtgctggcgaacaactggatcgaattttttcagttccagtttttccggcttagtacgtttgttcttcgtagtggtatagaagtgaccagtaccagcagaagaaaccagcttgattttctcacgaatacctttagccatgatttatttcctctaagtacttagtacttttcgccacgggcacgcagttcagccagaactgtatcgatgccttttttatcgattacacgcatacctttagcagatacgcgcagggtgacaaaacgcttctcgctctcaacccagaaacggtgagagtgcaggttcggcaggaaacggcgtttagtcgcgttcagtgcgtgggaacggttgttaccggtcaccggacgcttgccagtaacttggcagactcgggacatgtctattctccaaaaatcaaattagctcgagcttcgtatggggtattggcgcctcgtcaggctttacagcccggtcatcgcagttctatgtgaactctcgattgccaggcccaaatgccaaacccgagattctcaaaggtggcgtagtatacgctgactcagcgatgtgctcaagtcccgaacagacaaagatcccgaaggatcgcgcatagcgggttaaatccagccgcgttcggcaaaagaaacatactctccacgcccaatcacgatatggtcgagcacgcgtaaatccatgaactgacaactctttattatccgttcagtaatgagtttatccgctttactgggttcagcacaacccgaagggtgattatgtgcaaggatcagcgccgaggcgtttatttttatcgcttcgcggataatttcccgaggatggacttcaacatggtttagcgtgccggaaaaaagacgcctatgcgttataacccggtgttgggagtcgagaaagatcaccataaagatctcccgctcctcacccgtgagctggctttgtaaaaattccctcgtcatctccgggctgagtaaagggctttcttcacgcatccgcacgttgtagtaacgccgcgccagttcagcaatcccctttaactgggcaaatttcgccacgccaattccatgaacgccactaaattgttcatattcagaggttaacaagccataaagagagccgaaattctccagcatctcttttgccagggttaatacatctttaccgcgcgttccggtacgcagaaatagcgccagcagctcgacatccgttaaggcgctaataccaaacttcagcattttttcgcgcggcatcaacagctgtgaattgtttttcaccttcacctcctttgtggtgctcgcatcctgtcatagccgtttcgttaaatcgacggccagttttcaatcctggaaagcgcctcgcaaagtgaatctcaggtgaaggcacgacaacaaaagtattgtgataaaatcgccaacttctggtgtcaccctacaggaaaaatcatcatgagcctggccggtaaaaaaatcgttctcggcgttagcggcggtattgctgcctataaaacccctgaactggtgcgtcgtttgcgcgatcgcggggccgacgtccgcgtagccatgaccgaagcggcaaaagcctttatcaccccacttagcttgcaggcggtttctggttatcccgtttccgacagtctgctggacccggcagccgaagccgctatgggccatattgagctgggtaaatgggctgatttagtgattctcgcccctgccacggcagatttgattgcccgtgttgctgccggaatggcgaatgacctggtatcgacgatttgtctggctacacctgcgcctgtagccgtgctccccgccatgaaccagcagatgtaccgtgccgctgccacgcagcataatttagaggtgcttgcttcccgtggtttgctcatctgggggccagacagtggcagtcaggcttgtggtgatatcggtcctgggcgaatgctcgatccgttaaccattgtggatatggcggtagcgcatttttcgcccgtcaacgacctgaaacatctgaacattatgattaccgccggcccgacgcgtgaaccgctcgatccggtgcgttatatctctaatcacagctccggcaagatgggttttgctatcgccgccgccgctgcccgtcgtggcgcgaacgtcacgctggtatcaggtccggtttcactaccgacgccaccgtttgttaaacgtgttgatgtgatgaccgcgctggaaatggaagccgccgtgaatgcttctgtacagcagcaaaatatttttatcggctgcgccgccgtggcggattatcgcgcagctaccgtggccccagagaaaatcaaaaagcaggccacgcagggtgatgaattaacaataaaaatggttaaaaaccccgatatcgtcgcaggcgttgccgcactaaaagaccatcgaccctacgtcgttggatttgccgccgaaacaaataatgtggaagaatacgcccggcaaaaacgtatccgtaaaaaccttgatctgatctgcgcgaacgatgtttcccagccaactcaaggatttaacagcgacaacaacgcattacaccttttctggcaggacggagataaagtcttaccgcttgagcgcaaagagctccttggccaattattactcgacgagatcgtgacccgttatgatgaaaaaaatcgacgttaagattctggacccgcgcgttgggaaggaatttccgctcccgacttatgccacctctggctctgccggacttgacctgcgtgcctgtctcaacgacgccgtagaactggctccgggtgacactacgctggttccgaccgggctggcgattcatattgccgatccttcactggcggcaatgatgctgccgcgctccggattgggacataagcacggtatcgtgcttggtaacctggtaggattgatcgattctgactatcagggccagttgatgatttccgtgtggaaccgtggtcaggacagcttcaccattcaacctggcgaacgcatcgcccagatgatttttgttccggtagtacaggctgaatttaatctggtggaagatttcgacgccaccgaccgcggtgaaggcggctttggtcactctggtcgtcagtaacacatacgcatccgaataacgtcataacatagccgcaaacatttcgtttgcggtcatagcgtgggtgccgcctggcaagtgcttattttcaggggtattttgtaacatggcagaaaaacaaactgcgaaaaggaaccgtcgcgaggaaatacttcagtctctggcgctgatgctggaatccagcgatggaagccaacgtatcacgacggcaaaactggccgcctctgtcggcgtttccgaagcggcactgtatcgccacttccccagtaagacccgcatgttcgatagcctgattgagtttatcgaagatagcctgattactcgcatcaacctgattctgaaagatgagaaagacaccacagcgcgcctgcgtctgattgtgttgctgcttctcggttttggtgagcgtaatcctggcctgacccgcatcctcactggtcatgcgctaatgtttgaacaggatcgcctgcaagggcgcatcaaccagctgttcgagcgtattgaagcgcagctgcgccaggtattgcgtgaaaagagaatgcgtgagggtgaaggttacaccaccgatgaaaccctgctggcaagccagatcctggccttctgtgaaggtatgctgtcacgttttgtccgcagcgaatttaaataccgcccgacggatgattttgacgcccgctggccgctaattgcggcacagttgcagtaatatgacgccggatgacttttcatccggcgagtttctttaaacgccaaactcttcgcgataggccttaaccgccgccagatgttccgccatttccggcttctcttccaggtaagcaatcaggtctttcagggtgatgatagagatcactttgcagttgtaatcacgctcaacttcctgaatcgccgaaatctcgccgcgcccgcgttcctgacgatcgagcgaaatcaacacgccagcaagcgtcgcgccattggcctgaataatctccatcgactcgcgaatcgccgttccggcggtgatcacatcatctaccagcattacgcgtccttgtaacgcgctaccaaccagattgccgccttcaccgtggtcttttgcttctttgcggttaaagcagtacggcaggtccaggtcgtgatgctccgccagtgccacagcggttgtggtggcaatcgggatccctttgtaagcagggccaaacagcagatcgaactcaatgccggaatccaccaacgcttcagcgtaaaaacggcctaacagtgccagatcgcgcccggtattaaacagcccggcgttgaagaaataggggcttttgcgcccggatttcagcgtaaactcgccaaactttaacacctgcttgctaagcgcaaattcaataaactggcgctgatatggtttcatgccttcgctcctcatcttacttttctacagacaaaaaaaaggcgactcatcagtcgccttaaaaatcagtttgccagcgccgccttctgcgtcgctacaatggattcgattcccctcgggccagagccaacaagatgagtagctcttcatgggtgaacggctcgccttctgccgtcccctgcacttcaatgatgcgcccgtcttcggtcatcactacgttcatgtcggtctctgcggcagagtcttcaacgtattccagatcgcaaaccgcttcgccgttcacaattccgacagaaactgcggctaccatccctttcatcggattggttttcagcttgccgttttccaccagcttctgtagcgcatctaccagcgccacgcaggcacccgtaatcgacgcggtacgcgtgccaccatcagcctgaagcacgtcgcagtccagcgtaatggtgaactcacccagcgctttcaaatctactgccgcgcgaagagcacgggcgatcagacgctggatttccattgtgcgtccaccctgcttacctttcgccgcttcacgagcgttacgggtgtgggtagaacgtggcagcatgccgtactctgcggtgatccagccctggccctgacctttcaggaagcgcggcacgccttcttcaatagaggcggtacacaacactttggtatcgccaaattcgaccagcaccgagccttctgcatgttttgtatagttacgagtcagggtaacgggacgcacctgattattgctacggcctgctggacgcatattgaaatctccggcttgaaacaaatgtggctgcgcattatacggacttccggcggttattcctatcctgacaaggcatcgatggctataatccttccacctctccttttataaacaggaacgtctatgatccgcagtatgaccgcctacgcccggcgtgaaatcaagggtgaatgggggagcgcaacctgggaaatgcgctcggtaaaccagcgttatctggaaacttactttcgtctgccggagcagttccgtagccttgaacctgtcgttcgcgagcgtattcgttctcgcctgacgcgcggtaaagtggaatgtaccctgcgctatgagccagatgttagcgcgcaaggtgagctgatcctcaacgaaaaactggctaaacagctggtaactgccgcgaactgggtaaaaatgcagagtgacgaaggggaaatcaacccggttgatattctacgctggccgggcgtgatggcagcccaggagcaggatcttgacgccattgccgctgaaattctcgcggcgctggatggtacgctggacgactttattgtcgcgcgcgaaaccgaaggtcaggcactgaaagcattgatcgagcagcgtctggaaggcgtcaccgccgaagtggtcaaagtccgctcccatatgccggaaatcctgcaatggcagcgtgagcgtctggtcgcgaagctggaagatgctcaggtgcaactggaaaacaaccgtctggagcaggaactggttctgctggcacaacgaattgacgttgccgaagaactggatcgcctcgaagcgcatgtcaaagagacctacaacattctgaagaaaaaagaagcggttggtcgtcgtctggattttatgatgcaggagttcaaccgcgagtcgaacactcttgcgtcgaagtctatcaatgccgaagtgacaaactccgccatcgagctgaaagtgttgattgagcagatgcgcgagcagattcagaacatcgaataactcgtaacgccaattcttacttttccgccttcacaaatgccgccactcaaacagagcggcatttttcttccccgcaacattcaattctgttttgcgtgcctgctccagattttgcgatgtttttttgcccagcacactgagaacgtgagatactcacaactgtatataaatacagttacagatttactttctttgcaattgatatcacatggagtgggcaatgaacgaacatcatcaaccttttgaagagataaaactgattaatgcaaacggagcagaacaatggtcagcaagacaacttgggaaactactgggttattcagagtatcgtcactttatacctgtattaacgcgcgccaaagaagcctgtgagaacagtggtcacacaattgatgaccatttcgaggagatcctcgatatggtcaaaattggctcaaatgccaaaagagcattaaaagacatcgtactctcccgctatgcctgttacctggtagtacaaaacggcgaccctgcgaaaccggtcattgcggcagggcagacttattttgctatccagacccgacggcaggagcttgctgacgatgaagcatttaagcaacttcgtgaagacgaaaagcgtctgtttctgagaaatgagttgaaagaacataacaaacaattggttgaggcagcacagcaagctggggtagcgacagctactgatttcgccatatttcagaatcatggttaccaggggctgtatggtggattagatcagaaagctattcatcagcggaaggggctgaaaaagaatcagaagatcctggatcatatgggttcaacagaactggcggctaatctctttcgagctacccaaacagaagaaaaactcaagcgggatggcgtgaattcaaaacagcaagcaaacaccacacactttgacgtgggtcgcaaggtgaggcaaaccattcaggaacttggcggaaccatgcctgaggagttgccgaccccgcaggtcagcatcaagcagttggaaaacagtgtaaaaattacagagaagaaatagcagaaactaaaaactctttttgttgattgagacacccgatgcgtaagccaaggtccaggtgcagtgaacacaatggctaaatattgcacctttcttttccccctcagttttaacctattttttcttatgcattttctcagacaagaagtcagaagaatgcatctctgctacagaaaatagcgatttcacataactacaagttatcaatttcccctccccttaaaaaatctcaatcgtgacaatgcgcacaaatcgctaccctgccagacagatttttagggagagaaccatgctgttacacattttgtatttggttggcattactgccgaagccatgacgggggcgctggcggccggacgacggcgcatggatacatttggcgtaattattattgcgaccgccaccgcaattggcggagggtcagtgcgcgatattctgctgggccactatccgctcggctgggtcaaacacccggaatatgtgattatcgtcgctaccgccgcagtactcaccactatcgttgctcctgtaatgccttacctgcgcaaagtgtttctggtgctcgatgcgctcggactggtggtcttttctatcatcggggcacaggttgcactggatatggggcacggcccaattattgccgttgtcgcggcggtaaccaccggcgtgtttggcggcgttttgcgcgatatgttctgtaaacgtatcccactggtattccagaaagagttgtatgccggtgtctcatttgcctccgccgtgctgtacatcgcgctgcaacactatgtttctaaccatgatgtggtaattatctccaccctggtattcggcttttttgcccgcttactggcgctacgccttaagctgggattaccggtcttttactacagccacgaaggacactaaggttcaaaacctgtgatctgctgggcagccagccaactgcccagcttcttgatttgcgcattttccttccattcaataacctgtctggcgcgtcccgatccagtccccggcagctgctgccagaactgctccgtgctaaataaaagttgcgaccaggaccgttcatcactggcattaagcgccgcccgggttagcggtattcccattgccatcacccagcgagtaaaaggctgcttacgagccagattaaactgatgccatagctgcgcacttttacttttcgcgatccccggcgtgttctgtaattgctctggcgttaataaaagccaggaaaagatatgttcaaagcgatgagtctgatgcagcgcgcgccaaccggcctcaccaatgccatccagcccaagaacctgttttgcccccagccagactaagcgtgaaatgaactgttcctgacaaacatcagaagcaaagtagcaggtcaacgagttaaagcggttttctggcggtgtcggttttgtacgttctgcaccgcgccacaccacatcatcaatgcgaggaataccctgaccggcaaggctgacgagaatctgatcaccaggcgcaatatcccactcctgccagcgcctgacggaaccaatattcacccgctggacttttttatcatccagcatgacaggtgcgagtgacgcaaccaccgatattttaccgctcttacccaccgcaaactgaattgccttcacttcggcaacctgagctacaggttgatatttccaggccaccagccactctgcctggcccggtagccaatggcgggattctggctctttcgccgctcgtacaactacgccatcggtgacgaagggtaattccgctttccaccactcattgcgtacgcgcgcaacttcatcagcatttttcaccgcacgggtatacgtctgcgttagagtaaaacctgcggtagccagctcttttaaacgatcagacattaactgcggtccatccggccatgcccagacaaaaacgcccagagaattcagcgtgtcgctatcgtcctggcgcatcatcaagccagcaacttttgcgcgggcatttattccccccatttgttgttggatatgcccctcgcgctggagaaatatttccccctgaagcgtactgttggctaaaggcccgctaacggtttgcggcacagcggaaattaagctaactttctgcgtccagtcctcgcctttcaggccattaccgcgactgattgctttgttcagtttcccgtcccgataaaccagggttaccgcaacgccatcaacttttggctgcacccaaagatcgctacgttctcgcatccacagacttaatgcgtttttatccaccattttgcgtacacccgtatgggcaaccggatgcataaccgcaccatttaaaggcggcatcatcacgtcgcggggctcgctcccaaagcagcgttgccactgcgtaagacgggcgcttaactgatcgtaaacaccgtcttccacctcactttttccttccttccagtagtcatcgtcccactgttttatttgctgttgcaggcgggaaatttcttcctgtgctctggctggcgaccaggccggacagaccgcccacacagatgattgccagcacaagatacctattaatatcgccatccatactttcatcatcacctccgctgtagatagtcaggcagatatacaacgtgatgaaagcaaagccgagtggcaaaaacggagtctgcgaggacgcttcctgaaaatcgtctttattgcagtgaatgacaggcaaatgcggaagcagctacgcaaaacgcaacaactttgcgcaaaaagtgtgagcaagggctacgtcacatggccgcgccgtgtataataagctcgtatgtaggctttatttcgctaatcacatacgaaagatactcatggctcaaggcacgctttatattgtttctgcccccagtggcgcgggtaaatccagcctgattcaggctttattaaaaacccaaccgttgtatgacacccaggtttctgtttcacacaccacacgccaaccgcgtcctggtgaagtccacggtgaacattatttctttgttaatcatgatgaatttaaagaaatgattagcagagatgcgttcctcgaacacgcagaagtttttggtaattactatggcacttcgcgtgaggccattgagcaagtactggcgaccggtgtcgatgtttttctcgatatcgactggcagggcgcgcagcaaattcgccagaagatgccgcacgcgcggagtatctttattttaccgccgtccaaaattgaactggaccgccgtctacgcggtcgcggtcaggacagcgaagaggtcattgcaaagcgtatggcgcaagctgttgcagaaatgagccattacgccgaatatgattatctgattgtgaatgatgacttcgataccgcgttgaccgatttgaagaccattattcgcgccgaacgtctgcgcatgagccgccaaaagcagcgtcatgacgctttaatcagcaaattgttggcagactgaacctgatttcagtatcatgcccagtcatttcttcacctgtggagctttttaagtatggcacgcgtaactgttcaggacgctgtagagaaaattggtaaccgttttgacctggtactggtcgccgcgcgtcgcgctcgtcagatgcaggtaggcggaaaggatccgctggtaccggaagaaaacgataaaaccactgtaatcgcgctgcgcgaaatcgaagaaggtctgatcaacaaccagatcctcgacgttcgcgaacgccaggaacagcaagagcaggaagccgctgaattacaagccgttaccgctattgctgaaggtcgtcgttaatcacaaagcgggtcgcccttgtatctgtttgaaagcctgaatcaactgattcaaacctacctgccggaagaccaaatcaagcgtctgcggcaggcgtatctcgttgcacgtgatgctcacgaggggcaaacacgttcaagcggtgaaccctatatcacgcacccggtagcggttgcctgcattctggccgagatgaaactcgactatgaaacgctgatggcggcgctgctgcatgacgtgattgaagatactcccgccacctaccaggatatggaacagctttttggtaaaagcgtcgccgagctggtagagggggtgtcgaaacttgataaactcaagttccgcgataagaaagaggcgcaggccgaaaactttcgcaagatgattatggcgatggtgcaggatatccgcgtcatcctcatcaaacttgccgaccgtacccacaacatgcgcacgctgggctcacttcgcccggacaaacgtcgccgcatcgcccgtgaaactctcgaaatttatagcccgctggcgcaccgtttaggtatccaccacattaaaaccgaactcgaagagctgggttttgaggcgctgtatcccaaccgttatcgcgtaatcaaagaagtggtgaaagccgcgcgcggcaaccgtaaagagatgatccagaagattctttctgaaatcgaagggcgtttgcaggaagcgggaataccgtgccgcgtcagtggtcgcgagaagcatctttattcgatttactgcaaaatggtgctcaaagagcagcgttttcactcgatcatggacatctacgctttccgcgtgatcgtcaatgattctgacacctgttatcgcgtgctgggccagatgcacagcctgtacaagccgcgtccgggccgcgtgaaagactatatcgccattccaaaagcgaacggctatcagtctttgcacacctcgatgatcggcccgcacggtgtgccggttgaggtccagatccgtaccgaagatatggaccagatggcggagatgggtgttgccgcgcactgggcttataaagagcacggcgaaaccagtactaccgcacaaatccgcgcccagcgctggatgcaaagcctgctggagctgcaacagagcgccggtagttcgtttgaatttatcgagagcgttaaatccgatctcttcccggatgagatttacgttttcacaccggaagggcgcattgtcgagctgcctgccggtgcaacgcccgtcgacttcgcttatgcagtgcataccgatatcggtcatgcctgcgtgggcgcacgcgttgaccgccagccttacccgctgtcgcagccgcttaccagcggtcaaaccgttgaaatcattaccgctccgggcgctcgcccgaatgccgcttggctgaactttgtcgttagctcgaaagcgcgcgccaaaattcgtcagttgctgaaaaacctcaagcgtgatgattctgtaagcctgggccgtcgtctgctcaaccatgctttgggtggtagccgtaagctgaatgaaatcccgcaggaaaatattcagcgcgagctggatcgcatgaagctggcaacgcttgacgatctgctggcagaaatcggacttggtaacgcaatgagcgtggtggtcgcgaaaaatctgcaacatggggacgcctccattccaccggcaacccaaagccacggacatctgcccattaaaggtgccgatggcgtgctgatcacctttgcgaaatgctgccgccctattcctggcgacccgattatcgcccacgtcagccccggtaaaggtctggtgatccaccatgaatcctgccgtaatatccgtggctaccagaaagagccagagaagtttatggctgtggaatgggataaagagacggcgcaggagttcatcaccgaaatcaaggtggagatgttcaatcatcagggtgcgctggcaaacctgacggcggcaattaacaccacgacttcgaatattcaaagtttgaatacggaagagaaagatggtcgcgtctacagcgcctttattcgtctgaccgctcgtgaccgtgtgcatctggcgaatatcatgcgcaaaatccgcgtgatgccagacgtgattaaagtcacccgaaaccgaaattaatgttttatgaacccaacacgttatgcacgcatctgcgaaatgctcgccaggcggcagcctgatctgaccgtctgcatggagcaggtccacaaacctcataacgtttctgcgattattcgtaccgcagatgccgttggcgtacatgaagttcacgccgtctggcctggtagccgcatgcgcaccatggcttcggcagcggcgggtagtaacagctgggtacaggtgaaaacacaccgcaccattggcgatgccgtcgctcatctcaaaggccagggcatgcagattctggcaacccatctttctgataacgctgtcgatttccgcgaaattgattacactcgcccgacctgcattttgatgggacaggagaaaacgggcatcacgcaggaagcattggccctggcggatcaggacatcatcattccgatgatcggcatggtgcagtcgctgaatgtttccgttgcctcagccctcattctttacgaagcccagcgtcagcggcaaaatgcaggcatgtacctgcgtgaaaacagcatgttgccggaagcagagcaacaacgcctgttgtttgaaggcggctatccggtgctggcgaaagtcgcaaaacgcaaaggcctgccttatccccacgtcaatcagcaaggcgagatcgaagctgatgccgactggtgggctactatgcaggctgcagggtaagtgccatgaaaggtcgcctgttagatgctgtcccactcagttccctaacgggcgttggcgcagcacttagtaacaaactggcgaaaatcaacctgcataccgtgcaggatctactcttacaccttcccctgcgctacgaagatcgcacccatctctaccccatcggagaactactgccgggcgtttatgccacggtggaaggcgaagtgctgaactgcaatatctccttcggcggtcggcggatgatgacctgccagatcagcgacggttccggcatcctcaccatgcgctttttcaatttcagcgcggcaatgaaaaatagcctggcggcgggccgccgtgtactggcttatggcgaagcaaagcgcggtaaatatggtgcggagatgatccacccggaataccgcgtgcagggcgatctcagcacgccagaattacaggaaacgctcacgccggtttatccaacaacggaaggcgtaaagcaggccacgctgcgtaaattaaccgaccaggcgctggatctgctcgacacctgcgccattgaagaactcctgccgccggaactgtcacaaggaatgatgacgctaccggaagcgttgcgcactttgcaccgcccgccaccgacgctacagcttagcgatctggaaaccgggcagcatccggcgcaacgtcgtctgattctggaagaactgctggcgcacaacctcagcatgttagccttacgtgccggagcacagcgttttcatgcccagccgctgagcgccaatgacacgctgaaaaataaactcctcgccgccttaccgttcaagccaacgggcgcacaggcacgcgtagtggcggagatcgagcgcgatatggcgctggatgtgccgatgatgcgtctggtgcagggcgatgtaggttccggtaaaacgctggtcgccgccctcgccgcgttgcgtgcgattgcccacggcaaacaggtagcattgatggcaccaaccgaattactcgccgagcagcacgccaataacttccgcaactggtttgcaccgctcggtatcgaagtgggctggctcgccggtaagcagaaaggtaaagcacggctggcacagcaggaagccatcgccagcggtcaggtgcagatgattgtcggtacacacgccatcttccaggaacaggtgcagtttaacggcctggcgctggtgattatcgacgaacagcatcgttttggcgtgcatcagcgtctggcattgtgggagaaaggccagcagcagggcttccatccgcatcagttgatcatgaccgccacgccgatcccccgcacgctggcaatgactgcgtatgccgatctcgatacctcggtgatagatgagctgccgccaggccgcacgccagtgactacggtcgctattcctgatacccgccgtaccgacatcattgaccgcgtgcaccacgcctgcataactgaaggtcgtcaggcatactgggtttgtacgttgattgaagagtcggaattgctggaagcgcaggcggcggaagctacctgggaagagttgaaactggcgctaccagagttgaacgttggcctggtacacgggcggatgaaacctgccgagaaacaggcggtgatggcgtcgtttaaacaaggtgagctacacctgctggttgccacaaccgttattgaagtcggcgttgatgtgcctaacgccagtctgatgattatcgaaaacccggagcgtctgggtctggcgcagttacaccagctgcgcgggcgcgtaggtcgtggcgcggtggcttctcactgcgtgctgctctacaaaacgccgctttctaaaacggcgcaaattcgcctgcaagtgctgcgcgacagtaacgacggttttgtgattgcgcaaaaagatctggagattcgcggccctggcgaattgttaggcacgcgtcagacgggtaatgctgaatttaaagtggcggatttactgcgcgatcaggcgatgatcccggaagttcagcgcctggcacgccatattcacgaacgttacccacaacaggcaaaagccctgatagaacgctggatgccggagacggaacgttactcgaatgcgtaaaaggcggcagtgagaagaccgccatttcaggttaccctaccttcctgccggatgcgattcatcaccctacaaattcaataaattatgaatcaatacgcaggcttgataagcgaagcgtatcaggcatttgtctttgttgcggcggcacttctaccgccgcttcatcggttaaccggcaaaaatcggcaacatcaaatacaacttaattaccagcgcattgacgatatcgataaagaacgcaccgaccatcggcaccaccaaaaacgccatgtgcgacgggccaaagcgttcagtgatcgcctgcatgttggcgattgccgttggcgttgcaccgaggccaaaaccacagtgacccgcagccagcactgccgcatcgtagtttttgcccatcatgcgccaggtaacgaagatggcatacaacgccatgaagatggtctgtaccaccagaatcgccagcatcggcagcgccagcgaagccagctcccacagtttcagccccatcaacgccatcgccaggaacaacgacaagcttacgttacccagcacggataccgcacgctcaaagacgcggtaaaagcccattattgacagaccgttgctcagaatcacgccaacaaacagtacacagacgaaggtcggcagttcaaaagcagtgccagccaaaagttgcgcaacaattttccccaccgtcaggcagatagcaatcagcgcgatagtttcaatcagcaccaacgaggtgatcatgcgtcccacatccggcttttcaaacgccgtcgggacttcctggtcatccggaataccgttcggcgtggtggagtgtttcaccagatagcgcgccaccggaccgccaatcaagccgcccagcaccagaccgaacgttgcacaggccatcgccacttccgtcgcattggtgaagccataacgttcaatgaacaatttactccacgcagcgcccgtaccgtgaccgccggaaagagtaatagaaccggccaacagccccatcagcggatcaagccctaacaagctagccataccaatgccaatggcattttgcatcaccaacagaccaacaaccacaatcaagaagatgccaaccacacgcccaccggcacgcaaactggcaatgttggcgttcaggccaatggtggcgaagaaagccagcattaacggatcgcgcagggacatatcaaagttgacttcccagcccatgctttttttcagtactagtagcgccagcgccaccaacaaaccacccgcaacaggttccggtatggtgtatttcttcaaaaaggagacggaatggaccaacttacgcccgagcagcaacgtcagcgttgcggcaacaagcgttgctaaagtatcgagatgaaacatagttactcctttgtatccgcatcactctttcatactcgtcatacttcatcgcgcagtggcaacttcatgaactatgacgggtatcgagttatgctttcctgggtcaaattctcagctgttaatgaacaaatggcatggattttaagcagaaaaataccaaaagttatataaaaaagtgcatttatctcatttaaatatttagatgaggatgtggcaaacgtttgcttttctctttcggtcagctaaaatgcccgctttgctaccacgggattgttttcgatgtctgtttccaccctcgagtcagaaaatgcgcaaccggttgcgcagactcaaaacagcgaactgatttaccgtcttgaagatcgtccgccgcttcctcaaaccctgtttgccgcctgtcagcatctgctggcgatgttcgttgcggtgatcacgccagcgctattaatctgccaggcgctgggtttaccggcacaagacacgcaacacattattagtatgtcgctgtttgcctccggtgtggcatcgattattcaaattaaggcctggggtccggttggctccgggctgttgtctattcagggcaccagcttcaactttgttgccccgctgattatgggcggtaccgcgctgaaaaccggtggtgctgatgttcctaccatgatggcggctttgttcggcacgttgatgctggcaagttgcaccgagatggtgatctcccgcgttctgcatctggcgcgccgcattattacgccgctggtttctggcgttgtggtgatgattatcggcctgtcgctaattcaggttgggttaacgtccattggcggcggttacgcagccatgagcgataacaccttcggcgcaccgaaaaatctgctgctggcaggcgtggtcttagccttaattatcctgcttaaccgtcaacgtaacccttacttacgcgtggcctcactggtaattgcgatggcggccggatatgcgctggcgtggtttatgggcatgttgccagaaagcaacgaacctatgacgcaagaactgattatggtgccaacgccgctctattacggtcttggcattgaatggagtctgctgctgccgctgatgctggtctttatgatcacttcgctggaaaccattggcgatatcacggcgacctctgacgtttccgaacagccagtgtccggtccgctgtacatgaaacgcctgaaaggcggcgtgctggcaaacggcctgaactcgtttgtttcggcggtgtttaacaccttcccgaactcctgcttcgggcaaaacaacggagtgatccagttgactggtgttgccagccgctatgtcggttttgtcgtcgcgctgatgttgatcgtgctgggtctgttcccggcagtgagcggttttgtacaacacattccagaaccggttctgggcggcgcaacgcttgtaatgtttggcaccatcgccgcctccggtgtgcgtatcgtttctcgtgagccgctgaaccgtcgggcgattctgattatcgcgctgtcgctggcggttggtctgggcgtgtctcagcagccgctgattttgcagtttgcccctgaatggctgaaaaacctgctctcctccgggatcgccgcgggcggtattactgccatcgtgctgaatctgattttcccaccagaaaaacagtaattcactggcggcggtaagataattaccgccgcagtctcacctctttaaccattcccgccttgaggattgcgcgtaaatcgtgcataactcccttatgtgcatttcacgggatggaagaccatgaaatttattgggaagctgcttctctacattctcatcgctctgttagtggcgatcgctggcctctattttcttctgcaaacccgctggggagcagaacatatcagcgcatgggtttccgagaatagcgactatcatctggccttcggggcgatggatcaccgtttttccgcgccatctcatatcgtgctggagaacgtcacgtttggtcgtgatggccagcccgcgaccctggtggccaaaagtgtcgacattgcgctaagcagtcggcaactgaccgaaccacgccatgtcgataccatcctgctggaaaacgggacgctgaatctcaccgaccagaccgcgccgctaccgttcaaagccgatcgtctgcaactgcgtgatatggcgtttaatagcccgaatagcgaatggaaactgagcgcgcagcgggtaaatggcggcgtagttccgtggtcaccaaaagccggtaaagtgctgggtacgaaggcgcagattcagtttagtgccggatcgctttcgctcaatgatgttcctgccaccaatgtactgattgaaggcagtattgataacgatcgcgttacgctgactaacctgggtgccgacatcgcccgcgggacattaaccggaaacgcgcagcgtaacgccgacggcagctggcaagtggaaaacctgcgcatggcggatatacgtctacaaagcgaaaaatcgctaaccgacttctttgcgccattacgctctgtcccgtcgttgcagattggtcgcctggaagtgatcgatgctcgtttgcaaggtccggactgggcggtgaccgacctcgatctcagcttgcgcaacatgaccttcagtaaagatgactggcagacacaggaaggcaaactgtcgatgaacgctagcgagttcatttatggttcgctgcatttatttgacccgattataaacacggaattttccccgcagggcgtagcgctgcgccagttcaccagccgctgggaagggggtatggtcagaacgtcagggaactggctgcgtgacgggaaaacgttgatccttgatgatgcggcaattgccgggctggaatataccttgccgaaaaactggcaacagttgtggatggaaacgacacccggttggttaaacagcctgcaactgaagagatttagcgccagccgcaatctgatcattgatatcgaccctgacttcccgtggcagctcaccgcgctcgatggttacggtgccaacctgacgctggttaccgatcataaatggggcgtctggagtggctcggcgaatctgaatgccgccgccgcgacattcaatcgtgttgatgttcgtcgcccgtcgctggcgctgaccgccaacagcagcacggtgaatatcagcgaactgagtgcatttactgaaaaaggcattctggaagccaccgccagtgtttcacaaacgccacaacgtcagacacatatcagcctgaatggacgcggtgtgccggtgaatattttgcaacagtggggatggcctgaattaccgttgactggcgacggcaatattcagcttaccgccagtggcgatattcaggccaatgtcccgttgaaacctacggttagcgggcaattgcatgccgtgaacgccgcaaagcagcaagtgactcaaaccatgaatgctggcatcgtttccagcggtgaagttacatcgacggagccggtgcggtaaacatcaatctcgccgggtacgactcagacgtacccggcattccatcaatagattacaacgtaattgtcagcgcattcccttgaggcttcaccaccagcccctgctcactttcagcctgcgaaccgtcttgcagaccatttactttcacaacattgcgcaggcacagtgtccagttcttcgcctcgcccgcaccagtcacagtaatcgtgttgccagtacgtgctgcttttaaagtaaagatcaccgatccgtcagcagcgggcacttcacagacggcttcatgcccgtcttgcagattgaagaggtggaatgccgtgccttcgtgccacacgtaatcgggacgttgatcgttgttgcccagcgccagtagagtgttatcacgcacataaacgggcagactcaggaagccgtgctgctgtttatgccagcgactaccgtcgagttcatcgttgtgccacaggtgtgtccagcgaccttccggcaggtagaactgcacatcgcccgcttcagtgaacaccggcgcaaccatcacgttgtcgcctaacatgtattgacggtcaaggtaatcacaagccggatcgtccgggaactccatcatcatggcccgcatcatcggcgtaccccgcgcgttcgcacgcgcagcttcacgatacagatacggcatcatgcggcatttcagttgcgtgaagaagcgcaccacatcacaggactcatcatcgtaggcccacggcacacgataagatttgctaccgtgtaaacggctatggctggagagcaaaccaaacgcgcaccagcgtttgtaaacgtgcgccggagcggtattttcaaagccgccgatatcgtggctccagaagccaaaacctgaaaggccaatagacaaaccaccgcgcaggctttccgccattgattcgtagttagcgtaacaatcgccaccccagtgtaccgggaatttctgcgcaccgacggaggccgagcgggcaaacaagacagcttcttcctcaccaacggtgtccttgagcacgttccacaccagttcgttgtagatgtacgcataatggttatgcattttctgcggatcggaaccgtcaaaccactgaacatcagttgggatacgttcgccaaagtcggtcttaaagcaatcaacgcccatcgcgaccagacctttcagtttgtcggcgtaccatttgcaggcatccggattggtaaagtcataaatcgccagacctggctgccatttatcccactgccatagcgaaccgtccgggcgtttgagtaaatagcctttctcttgtaactctttaaagacgggggatttttgaccgatataggggttaatccagacgcagattttcagtcctttcgctttcaggcggcggatcatcccttccgggtcagggaaagtcagcgggtcccactcaaaatcgcaccactggaaggctttcatccagaaacagtcaaagtggaaaacatgcagcggcagattgcgttccgccataccatcgataaagctgtttaccgtcgcttcgtcgtagttggtggtaaatgaagtggttagccacaggccgaaggaccacgcgggcggcagcgccggacgaccagtaaagcgggtataacgatcaagtaccgctttcggcgtcgggccgtcgataacaaagtattcgagatattcactctcaacgctgaactgcactttggagactttctccgatcccacttcaaaagagacacactggggatgattgaccagtaccccataaccacggttagtcatgtagaacgggatatttttatacgcctgttcagtacttgtgccgccgtcccggttccaggtctctaccgtctggccattgcgcaccagggcagtaaagcgctctcccagaccgtaaactgtttcgccaacgccaagatcaagccgctcaaacatataattgcgttgattattcgtgtcctgcacgtagccattatttttcacctgactaccggtaatacgttcgccgttgcgcagaaaatccagtgaccagaactcacctttgctgacacgcgcgcttaagttgccacttttaaactcagcataacgttctgtgttttcgattgtgaccttcacgtcctgcaaaatattgagcggataatgaggaccgttattcagcgccccctgaaaatgctcaatccgcacaccgacaataccttcctgtggggagaaaaagcgcaacgtaaataaaggcgtatcaagctgccaggtacgttcacgcacatcacggggggcagcatagaccaccatttcattatcctgctgttcaacctcgaacacctgaagcgggtgaatcaaattgaggccaggttgaatcaaccagtttccatcgctaattttcattgccgttccttagttctgcacttcttgagaggtgaattgttgctggcaacggcgtttaccctgagccagctgttccataacggttttcagattgtgcgtcgtgagtgagtagtagcgtttagcgataatcgcgctcagcaaataacagatcgccggaacaatcgtgaatagcgcaataatgatgctaatcgtggcgctgttctgcgctttttctgccgcatcatatccgccataagccagcatccagccgataagagcgccgccgaaggccaaccccagtttgagcacaaacagcgtgccagcaaaactgatcccggtcaggcgtttaccattgcaccactcgccgtagtcgacggtatcggacatcattacccactggataggtgtcaccagttgatgcaacacaccaatcacgaagatgaagacaaacatagtgatgctggcctgcatgggaacaaagaacatcgcgaggctaatcactgccagcagggcgttcgtccaccagaagatagtgactttacatttccagtcggtcagaggttttgccagtgcggaaccaatcaggttacccacgcaataagtggtgagaaaagcgacaaacacttccggcgtgcccaaaatccatgtgacgtaatacatcatcgccccaccgcgtacgcacaccgccaggatattgaaaatggttagtaaaccgacaatccgccactggtcgttttgccagatatcacgtaaatcttcccgcatagacgttgttgtaggtggtgcttcaacgcgttctttagtggtgaagaaacaaaatgccagcatcatgaatgccaccacggaaaggaccgcgataccgccctggaaaccgagtggtttattatcaccgccaattaaattaaccagtggcatcatcagaacagtagaaagcatgcctcccgcggtcgccagcacaaaacgccaggattgcagcgagatacgctgagtcgggtcattggtgattacaccacccaatgcgcagtaagggatattgacgacggtataaagtaaggtaagtagggtgtaagtaattgctgcatagatcattttgccgttcatactgagatctggcgtgctataggccagtacacagacgatcccgaatggcagtgcgccaaacagtacccacggacgaaatttaccccagcgagagcgcgttcgatcggccaacaaccccatgcaaggatcggaaatcgcatccagtgcacgagcgaccaaaaacatggttccgacaaaaccggcaggaatgccaaaaatatcggtataaaagaacatcatatataacattacgttatcgaaaataatgtggctggcggcgtctcccatgccataaccaattttctctttaacggacaacacttcactcttcatctgcttttccttgatgctataggggtgctgagaccgataacgcattttgtaaaccatccctgtgagagcgaatattccgatatctggttattaatttatgattcttgttttatgtgatcgtggtagcgttaattccgctcatatatcattgtaaaatatgggttttatatgaactataatgctttcgtgataatacgctgcgtgtattaggcggaaaaaactgatctgggggatgtagaaactcaaggaagtagctataatgcgccccgcctccatgtagcaatcgaggcgcggaagatcgtcgtctccggtgaggcggctggacttcaaatccagttggggccgccagcggtcccgggcaggttcgactcctgtgatcttccgccaaaatgcctctcctgacgttctccaaccccttgtaatactgtcaatccagatattttctactgctcaatattcaatcggcttcaggaatacctggtctaaggttttgtgatggacgatgagcggctgaagaatccgcctgtcggttcttctgtcctcgaacgcatccgcgatattcacgccagtatgcgccgtgtttatttgcaggtgatttgcccccctgctgactctcagccaactgtatcgccattaaggtgaagatgttgttttactcgccccagaacacccttttttatacgactattctatttctttaaccgctggcgaaaaaaactgactataaacttcaccaataatcagactgccatcaagattaatttgttcatttaatatatcaaatcaacttgttttatttttactatcaaaaatagctcattgccttactataattaatatataaattcggtaattaattcttaacatgcttttactaataatctcaattgctggccctataatattgcgctagcattgctttctggttgtatcagcgatactcaaaaattcttaatacaatactcattcgactggtacttatttgtaactcagttatattttttcgcccggtgattcagaagaatgcaaaaaacggctaccactccatcaaaaatacttgatctcactgccgcggcatttttacttgtcgcctttctgacgggtattgcgggcgctcttcagactcctaccctaagtatattcctcgcagatgaactgaaagcccgtcctataatggtaggttttttcttcaccggtagcgctattatgggaattctggtcagtcaatttctggcaaggcactccgataaacaaggcgaccgtaaattactgattctgctatgttgcttatttggagtgctggcctgcacgctttttgcgtggaatcgcaactacttcattctcctctcaacgggcgtacttctgagtagttttgcttccaccgcaaacccgcaaatgttcgccctcgcccgtgaacacgccgacagaacaggccgtgagacggtcatgttcagtacatttttacgtgctcagatctcgcttgcctgggttatcgggccaccgctcgcttatgaactggcaatgggatttagttttaaagtgatgtatctcaccgctgccatcgcatttgttgtttgcggactgatagtctggttgtttttgccatcaatacaaagaaatattcctgtcgttacccaacccgtagaaattttaccctccacccacaggaagcgggatacgcggctactttttgtggtctgttcaatgatgtgggcggcgaataatctctacatgataaatatgccgctatttattattgatgaactgcatctaaccgataaactgactggagaaatgattggtatcgctgccggtctggaaattccgatgatgttaatcgcaggctattacatgaaacgtattggcaagcgactattaatgctcattgctatcgtgagtggaatgtgtttttacgccagcgtactcatggcgacgactccggcggttgagctggaattgcaaattcttaatgccatcttccttggtattctctgtggtatcggcatgctttattttcaggacttgatgcctgaaaaaataggctctgcgacaacgttatatgcaaatacttcacgcgtcggctggattatcgccggctctgttgacggaattatggttgaaatctggagctaccatgcgttgttctggctggcgatagggatgttgggtattgcgatgatttgcctgctgtttattaaagatatttagctcaccagtctgggctaagaaaaatcggcgtggcgcaaacagagccatcctcgccatttttgctatcatgcctgcatacataaacgacaaaacagtatgcagagggaaaaatgggttccaccagaaaggggatgctgaacgttctgattgccgccgtgttgtggggaagttcaggggtctgcgcgcaatacatcatggagcaaagccagatgtcgtcgcagtttttgactatgacgcgtttgatattcgccggtttgattctactgacgctgtcatttgttcatggcgataaaatcttttctattattaacaatcataaagatgccattagcctgctgattttttccgtggttggcgcgctaactgtacagctcacttttttgctaaccatcgaaaaatcgaacgcagccacggcaacggtgctgcaattcctctcaccgacgattatcgtcgcctggttctcactggtgcgtaaatcgcgcccgggcattctggttttctgcgctattttgacatcgctggtcgggacttttttattggtgacacacggtaatccgacgtcattatcgatctctcctgccgcgttgttctggggcattgcctcggcatttgctgctgcattctataccacctatccctcaacgctaattgcccgctatggcacgttaccagtcgtcggctggagtatgctgattggcggtctgattctgttgcctttttatgccagacaaggaacaaactttgtcgttaacggcagtttgattctggcgtttttttatttggtggtcattggtacgtccctgacatttagtctgtacctgaaaggagcacaattaattggcggtccaaaagccagcattttgagctgtgcagaaccattaagtagcgcgctactctctttgctgttgctggggatcacgttcacattaccggactggctgggaacgctgctgattctgtcatcggtgattttgatttcaatggattcccgtcgccgcgccagaaaaataaatcgtccggcgcggcataagtgagaattaccagccaggcaccgcgccaccgttaaaaatggtttctgccgctttagcgacttcgggtgattgataagattgcagaaattccttcacgttttctgcattcttattatcttcccgtgccaccaaaatattcacatacggcgaattcttatcttcaataaatacgctgtcgtgcaccggagaaagcccggtctgctgaatgtaagtggtgctgataatcgctacatcaactttgggatcatccagtacgcgcgggagctgcgccccctcgagttccataatctgcaaatgacgaggattatcggttatatccagcgcggtaggtaataacccttttccctctttcagagtaattagcttctctttttgcaacagtaaaagtgcgcgaccaaggttggtcgggtcgttggggatcgccactgtcgcgccttcttttatttgcgccacggttttgatttttttggaataacccgccatagggaagacaaacgtatttcccaccgctaccagtttataaccatgcgcctgattatcttgttcaagaaagggtcgatgctggaagacattcgcatcaagttcgccatgatttgtcgcatcgttcggtagcaacgaaccgctaaatcctaccagttcaacatcgaggccatatttctcttttgccacctttttagcgacttccgcgacatcttgttctgcgccatttataacgccaactttaatgtgttttgcatcgctgctactctggtcgcaacctgccagcagaattccggccagcaataatgcggcccctgtccgtagatgatgtgttgtcagtttcatttttttatccttttattaatgattacctgactatagcggtaaggtcgctgcggtttaaaaaacgaaacgctatcgataagaataaaaaggaataaaagtggaatataaagtctggcacttcttactgaccacgcaagcgcgtttcgtacagcatgatgagagcgatgaaagcaaactacacttatgcttcattcgatacacatttgtaaaaggttgaatccatgaaaccaacgacactactgcttattttcacttttttcgctatgccaggcatcgtatacgccgagtcgccttttagctcactgcagtccgcaaaagagaaaaccacggtattacaagatttacgtaaaatttgcacgccacaggcgtcattatcagatgaagcgtgggaaaagttaatgttgtcagatgaaaacaataaacaacatatacgcgaggccatcgtggcgatggaacgtaataatcagagcaattattgggaagcgttgggtaaggtagaatgcccggatatgtaagaacagcaacaactactgaccaacgcttctttacctgatatcaggatttcttcattttcacctttgcagtaaccaacaatgcagtcagcaacatcaatgtgccggacaacatcaacggcgaagtcagaccaatattatccagcgcataaccgccgattgccgcgccacaggtattagcaagctgaataaccgccacctgaatagacccggctttttctgcctgatcggccagcgagcgggtgatccacgttgaccagccgacgggaaccaatgcaaaagttagcccccagataatcgccacgccggtagcaacgattttatcgcttccccacaacgtcagtaccaacgcactcacagccagtattaacggcgcgcctgctaaggccagttttaccgaacgtttaagaatgaacgacgaaagcgacgtaccaataaagctggcgataccaaaactcaacagcaccagcgttaagccatccacgccgaatcccgccaggttcatatacaccgggcgaatatacgtgaagaaagcaaactgcccggcgaaagacatgaagatggcgatcatccctgccatcacacccggacgttgtaataagcggaaagtattttgtttctgatgcgagggttcgcctggcagtgaaggcaatgatttgataatccagaaaatacacagcacgcccatcaccgccgccgcattaaagacattgcgccaaccgataagctcgcctaaaaaactgcccaacggcgcggcaatcaccagcgcaatagaaaccgcgccgaagatcaccgacagcgccttcggcaccgtacgcggcggcaccagacgcatggtcagcgacgccgacatcgcccagaacccgcccagcgccagccccagacaggcacgaccgattaaaagcaaactgaatgagttagcaaaggaaaccagcaagcaggagagcgtcagcaaaacggcaaacaaaataacaacgtagcggcggtcagtagcctgaattgtctgggtaataaacaaactggcaaacattgccacaaaggcggtcacggtcaccgattgcccggcaaccccttccgaaatgcctaaatcctgggccattggcgtcaacaaactgacgggcaaaaactcaacgataatcagacaggcgacacaaaacgccaccgagaaaacggctgaccagttcggtcgggtgatggcatccgcgccgcggttttcggcaataaattcactcatggtgttacccgtggcatgtttcaggggaaaagccgaccactttaacattgaaatgtgtgacgcatttaacgtttttgcaacttttacggtgttgcttgagctggagttaagatcgaaacggaacagggcaaagattaccggatgcggcgtgaacgtcttatccacccgacaggtcaggcgcggtctgtaggctgataagacgaaacggtttcaatgcaaccagtgaacgccctcggcaggctgaaagaacgcgttatagcgcatctgaaaagcattaatatcctgcatttcaggttcggtttcgcgcagaaaacctagcgccagcctgacctgagcgtcggtaatcggcgcggcgaggcgagctttttgtaaaatccgatgccattgcagcaggttctgttcgctaccatcgacaatgacaatttgccagatgagcaacacctgcgcggcgttttgcaggtgcgactcatccggacgatgcaaataacgtaaaaattcgtcaccagctgactttcccatttgatcgaccatcgactccacgggtacgacatcgatgttcagccgatcgctgagacggcgaatcgcttttctggccccggatgtcagcacccgaaaaccaaccacaaacactaccgccagcgtggcgagcattatccagatcatgagttctcctgcgtaatcagaactcatgatatctggaaaccctcgccagttactaatccaccagaataatcttcagtgcaaacagagctgcgaccaccaccacacacaggttcagatcgcgccagcgcccggtgcatactttcatgatgcagtacgacataaagccgagtgcaatcccttcggtgatcgagaaagtaaagggcatcatcaccgtggtaataaacgcaggcaccgattcggtaaaatcatcccagttaacgcgcgccaggctcgaagtcatcagcacgccaacaaagattaacgctccggcggttgcgtaaggaggaactatcgccaccagcggtgagaagaacataaccaacaggaacataacgccaaccacaaccgcagtcagccccgtgcggccaccgactgccacaccagaagtactttcaatataggcagtaacagacgaggtgccgataaacgcacccgccaccgaactgacgctatcaacatacagcgccttattcatattggggaatttaccgttaccatctattaagcccgctttatcagttacaccaattaatgttcctgatgaatcaaataggttgatcagcataaaggagaaaatgataccggcgagttcaagtgttaacgcgccgctcaaatctacttcaccaatgacgccgctaatatcaggcggaatggaatagacgccgctaaaatgaacatcaccgaaaaataatccacagcaagacgtcaccacaatagaaaccagcaccgcggcatgaaaatgacgtgatgacaacacggttataataaaaaaccctaaaatacctaacaacacgccgtgagaacttaaatcgccaatcatcaccagcgtgtctttattggcgacaataacgccagtattttttaatcccattaaggcgataaataatccaattccgctggtgataccaatacgtaaacttaagggaatgttggagatcatccagtaccggatacgaaacagcgtgagcaaaaatagtccaactgcgccccagaatattgcgcccatcccggtctgccaggagatgcccatcgcccccacgaccacgaaggcaaagaaggcgttcagccccattgccggagccagcgccacgggtaagttagcaaatatccccatcgcaatactgccgataccggcaatcaaacaggtggtaacaaacaccactttcgggtccatttgtgccgcgccgaggatttgcgggttcacaaaaacgatgtacaccatggttaaaaaagtggtcatccccgcaatcaattctgtgcggacggtggtcccatgctgaggtagtttaaataatcgcgaaagcgtccctgattcattactcacgtaatcggtattgtcattattcatttttttgtccattggaggagatttaatcccttgcttttgtaaaacaaatgacaacaacggttcagtgataattatcacatttcaattgcacattaatggatattctttaataatctcgcgacgtttctttatgataaataataatcaaattgataaaatcaaaatgagaaaaatatgaataattctattaaccataaatttcatcacattagccgggctgaataccaggaattgttagccgtttcccgtggcgacgctgttgccgattatattattgataatgtctctattctcgacctgatcaatggcggagaaatttccggcccaattgtgattaaaggacgttacattgccggtgttggcgcagaatacactgatgctccggctttgcagcggattgatgctcgcggcgcaacggcggtgccagggtttattgatgctcacctgcatattgaatccagcatgatgacgccggtcacttttgaaaccgctaccctgccgcgcggcctgacgaccgttatttgcgaccctcatgaaatcgtcaacgtgatgggcgaagccggattcgcctggtttgcccgctgtgccgaacaggcaaggcaaaaccagtacttacaggtcagctcttgcgtacccgccctggaaggctgcgatgttaacggtgccagttttacccttgaacagatgctcgcctggcgggaccatccgcaggttaccggccttgcagaaatgatggactaccctggcgtaattagcgggcagaatgcgctgctcgataaactggatgcatttcgccacctgacgctggacggtcactgcccgggtttgggtggtaaagaacttaacgcctatattactgcgggtattgaaaactgccacgaaagttatcagctggaagaaggacgccggaaattacaactcggcatgtcgttgatgatccgcgaagggtccgctgcccgcaatctcaacgcgctggcaccgttgatcaacgaatttaacagcccgcaatgcatgctctgtaccgatgaccgtaacccgtgggagatcgcccatgaaggacacatcgatgccttaattcgccgcctgatcgaacaacacaatgtgccgctgcatgtggcatatcgcgtcgccagctggtcgacggcgcgccactttggtctgaatcacctcggcttactggcacccggcaagcaggccgatatcgtcctgttgagcgatgcgcgtaaggtcacggtgcagcaggtactggtgaaaggcgagccgattgatgcgcaaaccttacaggcggaagagtcggcgagactggcacaatccgctccgccatatggcaacaccattgcccgccagccagtttccgccagcgactttgccctgcaatttacgcccggaaaacgctatcgggtcattgacgtcatccataacgaattgattacgcactcccactccagcgtctacagcgaaaatggttttgatcgcgatgatgtgagctttattgccgtacttgagcgttacgggcaacggctggctccggcttgtggtttgcttggcggctttggactgaatgaaggtgcgctggctgcgacggtcagccatgacagccataatattgtggtgatcggtcgcagtgccgaagagatggcgctggcggtcaatcaggtgattcaggatggcggcgggctgtgcgtggtacgtaacggccaggtacaaagtcatctgccgttacccattgccgggctgatgagcaccgacacggcgcagtcgctggcggaacaaattgacgccttgaaagccgccgcccgtgaatgcggtccgttacccgatgagccgtttattcagatggcgtttctttctctgccagtgatccccgcgctaaaactaaccagtcaggggctatttgatggcgagaagtttgccttcactacgctggaagtcacggaataataaaaaaagcccggcgtcatgccgggcaaaagtcaccagttacgtttatgccactgtcaactgctgaatttttttctcgcggcggattttgcgttcttccattaccgccactatcgccatcaggcagatacaaccaatcgcggcgatatccagcgcggcgaaggtgcctgcccagccggtaaggccgaataccggcgtcccatcggcaatcattcccagacctaacttggcaaagctgtcaccaatcaggtaagcaaaggtgcctttaataccatcggcagcgccaatcgcttttttaggtacaaagccaacagcagccacaccaatcaacaattgcgggccaaagaccaggaaacccaacgcaaagagagaagccagatagatatattcgttactggcatgttgatacacaccgagcgtggcgataatcagcgccagcgcgatgcaggccaccaggccacggcgaccgttcgccaggtcagagagccagccccacagcagcgtaccgaccagcgcaccagcttcaaacagcgtaaagccctgaatcgccaccgctttagagagtttcagttcctggaacgcgtatacggttgaccactggtcgataccaatacgtaccacatagaggaaaatgttggcgaagcacagcagccagatcactttgtttttcagcacatactcaacaaagatctgccacttggtcatatcggtagattctgtctctttgtcctcttcgctgatctcctcgccgaacagttcttcagctttgccgaggccataagattccggggagtcgctgccgtaacgcaggccgataaaaccgacaatcagcgcgataatcgacgggaagataaacatgccgatgacatggccatcgaacaggtaatttgccccgaacagcgccacacctgctgcgcctgcaccgccaaggttgtgagaaatattccagaaaccgaggaatgtcccgcgtttacgacgcggcgtccatttggtgatggtggagtaactgcacgaaccgccggtactctggaaaaagccgcttaaggcgtagaaggcaatcatcaggaacaggctaaccgagccgctgcccatactggcactgaagcccagcatacaaatagcagagaggatcagcatgaacggcaggaattgtttggtgtttttgccgtcggcgtagtaggaaaccagcgttttacccacgccataagtgatggagaaacccaggccgatcatccccagctgcgtcatgctcaacccgtaggtcgaaatcatatcgttctgcgcgatgttaaagttcttgcgaatcaggtacatcgtcaggtagccgataaagaccaccaggtaggattgcatgaacggtttgaaccacattttgcgccgcacttcgagcggaaggtccagggtcggcttgcgaacctggtttaagaaagccagcatgggttactcctgaaatgaatacctgcgtgaggcatgcattgtaaaaatcagcagcaaatcaggcctgagatagcgtccaggcaaaacctggaaaatttcttagttttgccggatatgaagtgaaaaggtgagatgcatcacgcttcgcgcggtgtctgggcgttcaaaaagggcagtaacagcagtgcggaaatcccggcggcgatagagataaccacaaaaaatccgctccagtgccaggtatcgagtactttcgccagcggccaaccagcaagcgacgcccccagataagcaaacaagccgacaaaccccgtcgccgcccctgccgcctctttgtgggaacactctgccgccgccataccgattaacatctgtgggccaaagacaaaaaaaccaatggtgaagaagcaggttgcctgcatcacgtagctggcaaatggcatcagccacagggagccgactgaaagcaaaattccggcggcgaaaatcaaattcatcggccctcggttgccgttaaacaatttgtccgagccccaaccggctaccagcgcaccgataaatccgcccagttcaaacatcgtcactgccgtattcgccgtgaccagatcgacgcccagtgtctcggacatatacaaattgccccagtcgttgatcgccgcccggaccacatagaccagcacatagcaaaacgaaagcagccagatatacggattcagcaacacatatttggtgaggatctctttacgcgtcaaccctgccccttcttgttgttgagcaatttccagcgcgtcgtgtcgccattcaccgaccgccggtaaacctaacgcctgcgggcgatcgcgtagccgccagcagagaaaaatccccacgactatcgccatacaaccagcaatcatcatcccggcacgccagccgtaatgcagcgcagccgctgccatcacaatgggaatgagtgcgccgccgacgttatgcgccgtgttccataatgcccaccaaccgccgcgctcggtacgtgaataccaggccgttaacagacgcgcacacaccggtgaaccccagccctggaaaaaggcgttcagcacccagagcacggcaaacgcccatagcgacgtcgagaagccaaacagaatgttgataatgcccgtggcgataagccctatccccataaaataacgggcatttgagcgatcgctgacaatgccggagacaaacttcgacacgccataggtaatgtaaaacagggtcgctaacaggccgatatcgctacggctgagcacgccgttagcaaggatttctggtacggcggcgttaaaacttttccgcgtgaagtaaaacagcgcgtaacccagccagatggtcagcagaatatgccgacgccagtagcgatagcgggcatcaatttcatatttatcagtcattaatggcgcatcggcaggcgctttcagaaacggcaacatcatcaaaccttagacatagcgttgaggtagagaaacgctgacacgcgtgccgtgcagacaggaaatgtgtaatgtgccacccagcgccgttacgcgctcgcgcattccggtgaggccaaaaccttgttgcccggaacccggcggcaaaccgctgccatcgtcttcaataaccagcatcaaccgttcatcctgctgccagccttgcagggtgaccgcgctggcatcagcatgtttcacaatgttgttcagcccttcctggcagacacgaaacagcgtcacgcgctggttttcgcttaacgctgattcatcgattcgccattcgagatggctgacaataccgcgcccttccagctccatttcccgcatcagtgagcggatggcctgctccagggtgagatcatccaactggcgcggacgtaaccgacccaacaaacggcgcaccgcgtcgtaaacgcccagcgatagttgttcgatgagctgcccgctctgcttcacgctggcgttatctgccgccagccgctgaacaatgcccgcctgagtacgaatagcagtgatggtctgaccgatatcatcatgcagctcacgcgccacatcacggcgcacgctctcttcggtttccagcaaccgttcagccagatgctgattgcgcgccagttccttttgcagcgactggttaagttcacgcaaccgctggatgccagcgccaagcaacaaccctgtcagactttgcaccagcagcgagagcaataaatccaccggatgatcgcgccaggtttgactggcgatcagcgcgatggcgttcatcaacgtcgcaatcagcgccccttgccaaccatagtgccaggccagcgcgataatcggcagcgccagacagaatggcgtaaagcgcgacagttcgtccggcaatcccaactggagccagagactgataacaaacagcagcaagtaccagaccagatgtcgcccgcgccagttgattggctgagaaaccagtgacggaccgagcggcagccaggtgttattggcgagatagtgccagaacaccagacatatcggggccagcgtcaggccgccagttaaagtcagcaacagcgcattccacgactctttgccgtgccaaagccagggcagcgactgcaacaacgccgccgccgttaacgccgccccctgtaacagcaaggtgcgccagtcacgctgatggcgatagcgcgagatcagcgctacgggcagtaacgtcagtaaactaccgatcatcaataacggaaaatgggttaaaccgaccgcctgcgttagccagtaaatcagcagccactccgcgcccagcaatacgggccagtatccgcgcgggcattgcagcattagccccagacgcagaccaaacggaaataacagcaccgccatatcagggcgctcaaccagatgcaggctgatactccacaggcaaaaccatgcggcagagaagataaaaaagcaggcaataacggtaattaagcgggagaacaacgtcttcatcaccagccatcaaacatgcggcgcgccagctctacgtcgttactgacgcccagtttttccatcagattggcgcgatggacgtgtaccgttttcggtgacaagcccagttcggcggcaatctctttcaccgccattccttgcgccagtttttccgccacctggcgttcacgtttggttagcgggtcctgacgaccggatgccagtttaatggcaatatccggcgtcagataacagccgcccgtggcaaccgtatgcaccgcagcaatgagttcatccgggctacagcgtttggaaagaaagccgcgtgcccccgcgttaagcgcctgctcaaccagcgcaggactgtcgtgaacggagagcataatcgtcgccatacctttcggcagctggcttagcagctccagaccggagatatcgggcatggagatatcgcaaatacacacctgcacaccgcgccccggcagccccgccagcgcctcgcgccccgaaccaaactcggcaactacctgcaaatcaggttccagccccagcagctgcgcaaagccggagcggacgatgaggtgatcgtctataagggcaacggtgatcatggtcttgtcctggcgggtaaaaaaaatacgcgcttaccttaacgataagcgcgatgttgttcaagccttgagcggttactgaaaaaacaccgcgatcttgttaaacatcgtcggatcggactgattacgctgcactttcacgacatcttccagcttatcgatttggcttatcatctgctccagacgctggtcgtcattgaccagtagccagatatggcttttgtcgctgtcctgaatcggcagacaaagaatgccttcaacgttaaaagcgcggcgggcaaaaaggccacaaacgtgggtcattacgcccggatggttgcgaacggtgagctccagaattacgttgtcatgagttgtgttttgcatggcttattcccccaccatttcagtattcgccgcacctggcggcaccatcgggtaaactttttcttcggcatcaatgcgcacatggatcagcgccgggccagggcgattgatgatttcctgcaatgaagcctgcggatcggcttcgttattcaaatcacaggtttcgaggccgaatccggcggcaatctgcataaagttgattttgcccggataggtggcggcaaaaacgccttgctcgtagaacagactctgttgctgatgcaccagccccagcgcttcgttgttcatcagaatgattttgacatccagctgattttcactggcggtcgccatctcctgaatattcatcatcaggctgccgtcgccggagaaacacaacactttgcgatccgggttcgccagcgcagcgccaatcgccgcaggcaggccaaaacccatcgtgcccagcccaccggaggtcagccactggcgtgggcgattgagcggataagcttgcgcggtccacatctgatgctgaccaacgtcggtggtgataattgcattgtcatcgacacaggcggcaacggcgttgatcaggccgtaatggcttaacggatcgcacgctttcgggattggacacggaaactcacgctgcaaatccgctaccaactggtgccactctgcacgcggttgcgcttccaccagcgggatcaactgcgccagcacgtcatcaacatccgcctgaatcgccacgtgcggctgcttgattttacccagctctgcacggtcgatatcgacatgaatgattttggcattcggacagaactgctcggttttgccaatcgcccggtcatcaaaacgcgcaccgagcactatcaacaaatccgcctcctgcaaaatatagttggtgctgcgcacgccgtgcatccccagcatacccagcgacaacggatgcgcttttggcaacatgcccagcgccattaaagtcatggtggtaggcagttgcgctttctccgccagttcacgcacccgtgcgggcgcattgatcacaccgccgcccagataaagcaccgggcgtttggcagcgttaatcatcgccgctgcgtcacgaatgctttcttcgctaaaggcgggggcggcggctttttctgccatagcgggctgtgtttcaatctcaaaaactgccgtttgcacatccttaggaatgtctatccacaccgggcctgggcggcctgattgcgcaatgcggaaggcatcgctcatgacctgcgggagttcttcgatatgtctgaccagatagttgtgtttggtgatggggatagagatgccgtaggtgtccacttcctggaaggcgtcggtgccgatcatcgaggcgggaacctgaccagtgatgcaaatcagcgggatggagtccagccgcgcatcggcaatggcggtcaccaggttagtcgcacccggtccgctacaggccatacagaccgccggtttaccgtcggtgcgcgccattccctgagcgataaagcccgcgccctgttcatgacgggccagaatatggcggatttgcgtgctttggcttaaggcatcgtaaacaggcaggatagaaccgcccggaatgcctgtcacaatcttaatgccctgctgttccaggaaatgaacgataaattctgcgccggtaaagcgcttacgcgtcgatgttgtgcccgaacttgccatgctccagtccttttcttctgggccgactttccgggaggtgcttaaacgaaaaaccccgcccggtttgcgccggcggggttttggaatcgtgtgttgttccagtccctacggcgcattgccgacgaccaccaccacacgcacgacgaccactgcggcggatggcgcagttggtagtagttttgcgttgagcatggaagtagtcattggggaccttgttggttttgtgtttaacaatatttatacaagcacagctttacaggggagacaatggaaaatttttcagcaagggaaaattgaggggttgatcacgttttgtactgaattgcagataacaaaaaaccccgccggagcgaggtttcgtcagtcgcctgcggctggtaaccgcaaagcacactgtattatgtcaacactgaaagtatacgtgttccgcgcagaacgcgcaatttcggcacgaattttgacgtatttagtgcatagttgagtatcgatcacagtttgcgttttgtccaaatattactgtttatttatacagtaaacttctataatatcactgtacgcaatgtgttatgcgggggccgcatcgttacccggcgcactaagtcctggctgaaacgggtggtgccgtcagcgccttaaccccgcgtgagcacactgtgttatgtcaacaagcacaacgtttctccttgagataccgcgtgcacaacagctggcaacaggcagcggaaaggtacgtcagctggcagtgctcctgaaccacaggagacgcgtatgaacctggtggatatcgccattcttatcctcaaactcattgttgcagcactgcaactgcttgatgctgttctgaaatacctgaagtaattcagattcaagtcgcaccaaaggggagcgggaaaccgctccccttttatatttagcgtgcgggttggtgtcggatgcgatgctgacgcatcttatccgccctaccatctctcccggcaacatttattgccgcttttgtttacatattctgccgctaaacaattccccattcctggcgtatatctggctaacattcatcaatgtgatagattcctctcccgcatttatgggaatgcgtagtgacttattctaattatttttataaaagcatccgtgataatgaaaaggcaaagaaacgtcaatttgttattgatgttggtattactcgtggccgtcggtcagatggcgcaaaccatttatattccagctattgccgatatggcgcgcgatctcaacgtccgtgaaggggcggtgcagagcgtaatgggcgcttatctgctgacttacggtgtctcacagctgttttatggcccgatttccgaccgcgtgggccgccgaccggtgatcctcgtcggaatgtccatttttatgctggcaacgctggtcgcggtcacgacctccagtttgacggtgttgattgccgccagcgcgatgcaggggatgggcaccggcgttggcggcgtaatggcgcgtactttaccgcgagatttatatgaacggacacagttgcgccatgctaacagcctgttaaacatggggattctcgtcagtccgttgctcgcaccgctaatcggcggtctgctggatacgatgtggaactggcgcgcctgttatctctttttgttggttctttgtgctggtgtgaccttcagtatggcccgctggatgccggaaacgcgtccggtcgatgcaccgcgcacgcgcctgcttaccagttataaaacgcttttcggtaacagcggttttaactgttatttgctgatgctgattggcggtctggccgggattgccgcctttgaagcctgctccggcgtgctgatgggcgcggtgttagggctgagcagtatgacggtcagtattttgtttattctgccgattccggcagcgttttttggcgcatggtttgccggacgtcccaataaacgcttctccacgttaatgtggcagtcggttatctgctgcctgctggctggcttgctgatgtggatccccgactggtttggcgtgatgaatgtctggacgctgctcgttcccgccgcgctgttctttttcggtgccgggatgctgtttccgctggcgaccagcggcgcgatggagccgttccccttcctggcgggcacggctggcgcgctggtcggcggtctgcaaaacattggttccggcgtgctggcgtcgctctctgcgatgttgccgcaaaccggtcagggcagcctggggttgttgatgaccttaatgggattgttgatcgtgctgtgctggctgccgctggcgacgcggatgtcgcatcaggggcagcccgtttaagcgcacgtcaccgcagcatcgtcatcagctccatgggagaacgatgctgctttatcagatcacgcatcacccgcatatgcggtgcggagtaagaataaaacgcctgatagcccgcacaaagcacgctgtctggcgtctcctgccgagcgtgcgggcacaggcgatgccagtcgcacgcctggcagtcacagcgcggttgcgggttttcgctgccacaccatttttgtaaggtggcgtcaaaaagctcaatcgagatacgactgatatctgcccgcacccaacactcgaacagggcaattaaaaatttcccccacagctctgctgtcaccgaagcggccgtcagatcgccccggtcatcaaattcaagatagggaatgagctgtacggagcggatgccccgctgtttgaaattgtgataaaaatcggcaggttgcagagcatccttgtactctacaaccagtttatgcctgtcctcttcagcatcaatgacctgacttcctgtcatgcgactctctcaataaatacgataagttgatgtatatgcgttacagcaaacagtattgcgagagataacaccgcgagggagatcaaaaatttgtcacggactacgtgaaattgggaaaaatcgctattcgtgacatccattaaattgcgattacgggtgtagtgccagaggatcagcgccacgatggcgagaatgccaatcgaaatccagaataacatgcccgcctggtgccagttgtgtttgatagccaacgccatcaacgcgccgtagcccagcatggtacgaaaccacgccagtgatgtgcgctccggctgcagtcctgggtcggcaatgcgtctggctttgcggctatccggcatacaacaccagtcccataacgatcaccgccacgaccatcaatattaagctaatgattaataagctgttggtgtagggcaggtcctctttcagacgcatcgctttttcattgcgtaaccagcgcaagtagccatacatcgctaacccgccggaaaacagacacaacaacaacgccagcagttcgcgaatgacgggcgtggcgaaatctggcgcaagttgatcaagcccaacccccgccgccagaaatcctagtgcagtacggatccacgccagaaaagtacgctcattagccagcgagaagcggtaatcaggcgcttctccgaggcgggaaattttcattgttgctcctttgcaatttcactaacgctctacctttagcggtttttttaagaatttcgtccgcccgtttcctgatatgcttttgccatccgctacaaggaggtcagatgggtatcatagctcaaaataaaatcagttcattgggcatgctgttcggtgccatcgctttaatgatggggattatccacttttcattcggccctttctccgcaccaccgccaacgtttgaaagcatcgtggcggacaaaacggctgaaattaaaagaggtcttctcgccggaataaaaggcgaaaaaattaccaccgtggagaaaaaagaggacgtagatgtcgataaaatcctcaatcaaagcggtatcgcactggccattgctgcgctactttgcgcatttattggcggtatgcgtaaggaaaatcgctggggcattcgcggcgcgctggtttttggcggcgggacgctggctttccataccttgctttttggtatcggcatcgtgtgcagcattttgctgatattccttatcttttccttcctgaccggcggttcactggtttaagcagcctgaataatgcccgccgggtgatcatcagcgggcattatcgtcagaacttctgttttttctcctccaccttcaccccttgtgtcggtaggccggtgtcatagtcgcgtacaactggcgaatagccatcttgtggacgtggacgaaacgcccccatccagcgcggccgtgcatctttacgccacggacgcagactccattggtaactgcggaacggatcgcgaattttgtccatgtaatccaataaggcgtcatgcattttgctgcgaacgtctgcaaaacggatatcatcgatcaggttatgcatttcatttgggtcattacggcgatcgtaaagttcatcactggtgaagaggttgagtaccagtttaaagtcatccgtcacccagcaacgcaccggaataaaaccgccaaagctgtcatgctcaatctcgtagcggttaaattccaccatcacgccgcgtggctctttcacggcaaggatattttcccccggcagaatctctggtttttcaatatctgccagcgccatcattgtcggcagtaaatcgatatgactgactggcgtatcgacctgtcgccgctccccttgcggcgaacggatgatcagcggaatgcgggtgatgtcgtcatacatcgccgcccctttactgatcagcttatgtgcgcccatcatttcgccgtgatcggaggtataaataacccacgtattttcacgttgctctggcgttaaggcattgatgacccgtccgatttggtcatcaacaaagtcattacaggcaaaatagagcggatggtgataaagcccgtcatcaccgactggcgatggcatcgcctgcgcccataagcggtgatgttccggtttgttagccaggtcatcctgtgctttctcgcccagctcgtagtaaaaatcagcgtatttctctaaatactccaccggacaggtgaacgggtgatgcggctcatcatacgaaaccaccatcaggaaaggctcgtctgcgcgcgcaggctgttgcagaaaatccaccgcccgattgctgatacgatgcgcccaggtgaaggtttcgtcgatatggttcgcctgtaaatcttcgacgctgtttaggccattgcgccacaggctaatctctttttccgtcagttcgctaagatagttcgccccatcgaaccagtaatcagcgtcccactccggcggacactcgccagtgccgaaatagtcatgaccgtcgagatgccatttgccgatgtaacaggtgtgatagccggcatccttaaagtagcgccccatagtggagatgtttttgcctggcgcgacgttgttggtccacgggccggactggttagcgtagataccggtaaatagtccggcccgtgcaggcgtacaaaccggtgaacaggtgtaggcggaattaaagcgaataccttccgccgccagactatcaatattttgcgtattcagcggtttaccgctatagcaaccgaccatattggtggcctgggtatcggtcatgacgaacagaaaattggggcgtttcataggctatccttcccgtcgggagtaaaggttacggctgggtcgtgacgatgccgccagctgtcaaaaatcaggtagacaatcactacggcggcaatgaaataactgatcatcgctaaccagcgcgtaccgtagccgccgaattcagccagcccggcatagacgccaatcatcgcgaacaggatgccaattgacgcgatcttgacgtttttccacggtttcatgtccaccgcaaacgcatctttgaaggtgaacggcgtggcgcgcggtttgataaaaccgatcaccagcatcacgaccacgttgatgcagaacgtacaggccagcacatagaggaaatggaagtcgaacttcaccagatagttgatggtgatgtagctgattatgccaatccccatcgctacttttgccgccagcgccgggatgcgcgggaagaaaaagcccataatgatgatggtaaccagcggcacgttgtaaatgccgttgagctgtttcatccagctatacagcccctgcggcgcgttggcgatccacggcgcgaccagcaccgaaacgatagcgataaagaaaccaaatttgcgcccgacggtgaccagctgctgcggctcggcattctggttaatgatgcgacggtaaatacccatactgaataacgtactggcgctattcagaaagccgttgaaggtactgatcaccgcaccaaataacaccgcgccgaagaaacccaccattggcactggcagaacgttattgaccagcgtcgggtaggccatgtcggctttcggtaaatcctgatacagatgaaacgcaatcaaccctggcagcaccagtaccagcgggtcgagcattttcagcaccgccgttaacagcgcccccttttgcccttccgccaggctttttgacgccagcgtgcgttgcacgatgccctgatttgtacaccagtaaaaggtgttcaccagaatcaaaccggtaaatgccgcgccaatcggcaagggatcggtcgggccaccgattgagtttaatttctcggcgtgaacggtggtgagttgctcaatgccctgcataaagctgcccttgcccatcgcgattaggccaaataccggcaccatcaacccgccgataaccagcccaataccgttgatggagtccgccactgccattgcgcgcagtccgccgatcaccgcatacaaaattcccgccagaccaagcaaaattaccagtagccagatagccgcaccgtgagaaatctgtagcgattccccgacgtgaaacaggctgttgagcgccaacgcgccggagtagagaacaatcggcagaaagcagacgccggtggcaattaggaagcagaagtcgatgataatacgcgtcgttttatcataacgttcctccagaaaatcggggatggtggcaatgccgcgcttcagatagcgcggtaaaaagattagcgcgaggaagatcagcgtcaccgctgaagtcacttcccagcccatcaccgacatgccgcttttgtaggcctgcccggaaaggccgaccagttgttccgtggaaaggttggttagcattaacgaagcggcaataaccggcgcttttagtgaacgtccggcaagaaaatagccttgttgcgatccggtatctgttttgcggaccttccaccaggtgatcaccgccaccagcagcgtaaaaccgacaaaactcaagatttgtaacgaattcatctcatagcccttatttatgtttatgtcccggacgcatgaatatagggagaggtaaaatgcgtcgggtcaggcagtcagattcttaaaatacaaacgtcgtatccctgaacggattgttttctgttaagttcaggttgtgagcataattcgccggagggatattaaaatgaatggaaaattgcaaagttcagatgtaaaaaacgaaactccgtacaatattcccttattgattaacgaaaatgtgatctccagcggaatttctctgatctcgctctggcatacctacgccgacgagcattaccgggtgatctggccgcgggacaagaagaaaccgcttatcgccaactcatgggttgcggtgtataccgtacaaggatgtgggaaaattcttttaaagaatggcgaacaaataacactgcatggcaactgtattatattcttaaagccaatggatattcactcttatcactgtgaaggtttagtctgggaacagtactggatggaatttacccccaccagtatgatggatattcccgttggtcagcaaagcgttatttataatggcgaaatttataatcaggaactcaccgaagttgctgagttaataacttcaccagaagcaataaaaaataatctggcagtcgcttttctgacgaaaattatttatcagtggatttgtcttatgtacgcagatggtaaaaaagatccacaacggcggcaaattgaaaaattaattgccactttacatgccagtctgcaacaacgctggagcgtagctgatatggctgccacgatcccctgtagcgaagcctggttgcgtcgtctgtttttacgctataccggcaagacgccgaaagaatattacctcgatgcgcgtctggatctggcgctatcgctattaaagcaacaaggaaactcggttggcgaagtcgctgatacgctcaacttcttcgactcctttcatttcagcaaagcctttaaacataaatttggttatgcgccgtcagccgtgctaaagaatacggaccagcacccaacggatgccagtccacacaattaacgtaactctggccagtacgctttgttggcctccagcaactcatccagaatagctttggcgaccgaggcgctcggtaccgttttcgacaacgtaatcgcctgccacaggtgctgatatgaacgctgttcccaggcgtccacgaccagtttttccaccgccacttgctgactcattaaccctttctgaaactgcgggatatcgccgaccaccagtggttcaggccgtagtagcgcacgcgcatctgtttgcgatcttgcagcccaacaatttgcgccatccggctttcaataccgattggcatgtcacagatgttgaggattttcgcattcgggcgcagacgacgcgtggcttctgcgacaatggctgccgggttggagtagttgagcatccaggcatttggtgaatatttttccatataatccaccagttccaggacgccgccaatggaacgcatgccgtacgctattccgccgggtccgcaagtttcctgaccaacaacgccgtggcgcagcgggattttttcatccagttcgcgcatcgggtatttgccgacgcggatgtgcgccatgacaaaatcaacgtcgctgaatgccacttcaggatcggtggtgtaactaaacgcaatgtccggcgctttttctttaaggatgactttacaggcttcggcaatcacttcctgccgcgcaccatcgttatcataaaatttcagtgcacgaagcgggaaacggtcctgattcgccaggagcatcaacacgatgcctggcgtaaaggtgcttccaccgcctgcgacaaccactgagaatttggtcattatactgcctccgtaatggcaacattttctgctgattgatgagaattaattaagctatcgagctgttcacgcagctgagatacatgcagaccaatgatcacctgaatggcatcgccactacggaagacgccgtgcgctcccagctttttaaagacttcgtcatccagcgtttgtgacatgtcatgcagtgcaatacgtaaacgcgtcgcgcaattgttaatgctggagatattgccgaccccgcccagggcttgcaggataccggcagcctgatccagctctttttttggctctgccgcggtggtttggcctcgcgaggctttgtattcggcttttgagtagagtttcacttccgcatcttcacgtcccggcgtgcacatgttgaactgcagaatcagtgtgcggaaaaccacgaagtacagcagggtaaagcacaacccaatggcgatttgggtcagcatcatatccgcgtggttgctgaacatcgggatccagttttgcggtaaaacctagtcaatcagacctccgcccatgttgcccaccacaccaaagagatacattacggtcgacattgaggccgccagcacggcgtgtaccgcaaacagcaacggtgaaatgaacaggaaggtaaattccagcggttcggtaattcccaccagcatggcggttaaggttgcgggaatcagcaagcccgccacttttacccgattttccggtgcggcagtgaagtacatcgctaaagaaatgcccacggcaccaaagatttttgagttaccgtgcagggcaaaaccgccttccgggaacaacgatttcagcggctcggcgctcaaactgaactcttgcagatgctgcgcccagtacatctgaatgccgccttcaacagctgccggaccaaagataaactgtccgtagatgaagtggtgtaaaccggttgggatcagaatacgttcgaggaaggtgtaaacccagaccccaagtgcacccgccgaacgcaggaacgcttgcagagattcaatccccatttgtacttttggccagccgagcaacgtcagccaggcacaggggatcatcaccaggaaggcgataatcaccacataagacgtcccctggaaaatgccgagaaaaaccggcagttttttatcgaacagacggttatgcagcgccgtcacaatgccggaaatgataattgcgccgataatgctggtatcgagggttttaatcccggccatcattgtcagaccgctacctgccaccgcgtcctgagtgaaatcgacgccgaagtagcttccccaggtcattcccatcgcgttgatgaaatagttccaggtcaggaaactcaccatcaccgccagacaagcacgcccctgcgcttgcttagcaaggccaatgggtaaaccgacagcaaaaatcagcggcatattacggaataccgtccaaccgccctcttcaataatgtgtacgatttgcgcgaataaactgttcggatcggtcagtgattccccgacaaacatcgggttttgcagcaagatggcaagacccaccacaatcccggcgaagggaaacagcagcactggcgtgaacatcgcgccgccaaagcgttgaatttgactgagcatttccacatcctcttttctcaattctgtaagtaggaagcctgattggttatgcggcaggcctggagcgaggataggaagatgcgatcggcagaacatgacgacccaatgggattcgtgatcgctttcatgcttttcgttgggcggtagagatctacgttttcgcgaaaaagtagacctctgtgagcacaggtacacagcatcgaacacatctttaaaaaaaagatgttttttcaatcgattaagcagaacttgtgtgcgcattacccgggcttgcaggcaaaaaagagatctagagatgatctacaaaagcattgcggagcggttaagaattcgacttaactccgcagatttcacgctaaacagccttcttcccggtgaaaaaaagctggcggaagagtttgcggtatcgcggatgaccatccgtaaagccattgacctgctggtagcgtgggggctggtggtccgccgccacggtagtggcacttacctggtgcgcaaagatgtactgcatcaaaccgccagtctgaccgggctggtggaggtgttaaaacggcagggaaaaacggtcaccagccaggtgctgatttttgaaatcatgcctgcgcctccggccattgccagccagttacggattcaaatcaacgagcagatctacttctcccgtcgcgttcgttttgtggaagggaaaccgctgatgctggaagacagctatatgccggtaaaactgttccgtaatctttcgctgcaacatctggaagggtcgaagtttgaatatattgaacaagagtgcgggattttgattggcggtaattatgaaagcctgacgccagtgctcgccgatagactgctggcgcggcaaatgaaggtagcggaacacacgccactgctgcggatcacctcgttgtcatatagcgagagcggggagtttttgaattattcagtgatgttcagaaatgccagcgaataccaggtggagtaccatttacggcgactccacccggaaaagagttaaccgatactccagaagagcaccgccagtaattggggggtgataatgcgcaggaacattaccaacggatagacagtggcgtaagagagcgccgccgcaccgctggttggatgaagattattagcaaacgccagcgccggaggatcggtcatggaacctgccagcatcccgcacatggtcaggtaattcattttggctaacatccgcgccagaatgccaacagtaatcagcggaacggcggtgatcagggcaccataaccaatccagcttagcccttcgccattgaccagggtattcacaaaatccccaccagatttcagaccaacgaccgagaggaacagcacgatccccagctcccgcagcgcgaggttggcgcttggcggcataaaccagtacagcttgccgatactgccgatacgcccgaggatcaacgccataatcagcggtccgcccgccagccccagtttcaacgcggccgggaatcctggcacaaagacgggaatagaacctaacaatacgcctagcccgatgccaataaacactggcagcatctgaacctgttgcagtttttgctgcgcattccccagcacattggcaacggcatcaattgcggacggacgccccaccagattgaggatatcgccgaactgcaggctgatatcgccactggcgaccagttcgaccccggcacggttcaggcgcgagataacaacgtcatagcgttctttaaagtgcaggtcgcgaatacgttttccgagcacgttttcattggtgaccaccacacgctcgacgcgcaaatcagtgcctttcgtggacagcgaagtatcgacctcctgaccaatcaccagttgcgcattatgtaaatccgctggctgacccaccagatgcagcaaatcgcccagttggataatggtatctggcgaaggaacttttagggtttcttcgcgtttcagacgcgagcagataattttgtcgccgttgagaatcggtacatctttaatggctaaatcatgcaggttagggttctcaacgcgaatattgatagtcttgatcagcgcgccgccattggtgcgtgaagactcgtgctgctgagcttctgtctcgacattgacgcggaaaataacccgcaacatccacatggtgaacaaaatcccgcaaatgccgaatggatacgccatcgcgtaactcatccccatctgatcgaccatttccattggtgtacccaggtcgcgcaaaatctgctgccctgcccccagcgctggcgtattggtaaccgcaccggagaaaatccccagcactaccggcagtggaatatcaaacagtttatgcaggatggcggtaaccagaccaccgatgatgacgatcagaacagcaaacaggttgaggcgtaatccggagacgcgcaatgaggcaaagaagcccggccctacctgaatcccgatagtataaacgaacaggatcaggccaaattcctgaataacatgcagcatatcgctacttaatgtcatccccgcctgagaaacaaaatggccgacgatgatcccaccaaacagcacgccgccaatacctaatcctatgccgcgaaatttgacgttgccgataaacaaaccgacgactgccaccaaagccagaatactgaccgttaatgctatatcactcatcgtccatttctcttgagataacattttaattgctacggattatggctgaatcggtgaagcagatttgccttatagcgcacattatcacgggaaagaacgtgccgaaatatcttaaacagtcgaaatttaacgcattgttgagtaagtaagacaaaaaaagccccaccagaatggcggggcaaagagaatagctagttagctatttaacgcgggacgttcgctgatagcgatacgctgcgctgcgatgggttcaggctcattacgaattaaatcaatatgcagtaaaccgtttacgaaggttgcgccagagacttccatattttcagccagcgtaaagctcaggctaaatggctgattcataagcccttgatgcagccattttttctcttcttttggctgctccggcgtgccttttacgctcaggcgcgtaccttccagttgaatctctaaatcttcctgacggaaacctgccagcgcaagggtaatgcggtagtggttatcgtcgcttttctcaatgttgtacggcgggaagctctggctttcaccggcgttttgcagtgcgttggccagtttgtcaaaaccgatccattgacgcatcagtggggataaatcgaagttacgcatagtcatttctccttctaagaagcgagtaagtacctgcaaatccgaagattcgcatatgctccctgacggcgagcatggagatgtcaggccgcgccaggcggccttagggaattagttgatttcgatacggcgcggttttttcgcttccggaatcacgcgttcgagatcgatatacagcaaaccatttaccaggttagcaccacgaacatgaatgttctcagctaactggaatttgcgttcaaagttgcgttcagcgatgccctggtacagataggtgcgctctttttgttcgtcggcgtgagcacctttcaccaccagcagattatcctgggcggtaatttccagttcgctctcagcaaaaccagccacagcgatagcaatgcggtaatggttttcgtctaccagttcaacgttatacggagggtagccgccattactctggctctggttgttttctaagtggttaaacaaacggtcaaatccaatagcagaacggtaaagcggggataaatcaaagttacgcataatcaatagctcctgaaatcagcgagaatgtaagaccttccacaatggacaggtcaggtagccagaacacccatcaggcgcgtcctcatcggctacgatgtaaaaatgggtctggaaatgaacttttcaagccttatcagcggacttttttttgcagtttatggtctattgcatagactgagggggcagcacgaaacgttaaagtgcgatagccgccacagtgcgacgtaatgatgatgttattttcagcaagggatcgctataactcatcaggccaacacccacgatcaacagatgaatttattatgataagaaatgtgttgttagcgttcatgatatgcagcggaatgacattactcggaggatgctccagcgtgatgtcccataccggagggaaagaaggaacgtatcccggcacccgcgccagcgcaaccatgattggcgacgatgaaaccaactggggcactaagtcgctggcgattctcgatatgccgtttaccgctgtgatggacacgcttttactgccgtgggatgtgttccgcaaagacagctcggtgcgctcgcgcgttgaaaaaagcgaagccaacgcgcaagccaccaatgcggttattccaccggccagaatgcctgataactgatttagcgatcagtttcggtgatccacagctggccgccttccatccacgccagccactgaccatccggcgagaagaccacggcgtccgcagaaggtgaattggcgtggtgttcggttaaatactcaacctcgccgctttgcgcatgggcacaagcaattcgattatccagcacaaagcccaaccattctcctgacggatgccagttaaatgcagactgaatatccgttttgttatgggttaactggcgcggctcgccgccctgtggcgagataagccacagttgcacaatgccgttatcatctcgcattaaaaacgcgatttgtgtaccctgcggattacagcgcacccagtggcgcgggacgttgactaaccccggataagcccgatggtgggtaaaggttaaacgtcgctgcacgacgccacgcggtggcgcgggcagggttgtttccgttccgcttaacggcgcatcacctgccgctttccagccagcttcatcttgcggtaactcaacgataaacagctccggcactttctcgccctttggcgaaagtgtgtcgccaataaatgccagcgcgtgatttcctacccatccttcttcataagcacgattgatttcatcactgccaggctgtggcgtgggcgtggttttgctcaccagcacgcaccagtggctaccgctgtattcacgcggatgctgcttttgtacgttgaccgggccaaacggcgcagcaacaccgacgtttcgcaaatccagcgccggatcgagttcatgcattacatggtcgttataggtaaagctcaccctttcaccgttcgggctaaagacatgcacatggctgccgccgcgcagcactcctggcgtatacggcgcggtaatatccatcgcatcaaggttactcatcttgccgccttcaacaatcactccgcgccgatgatggaagtcgtaatgccatgtttcatcaggattttccgggccgtggatgaaaacatatttctctgacttcggatgaacggtcaccacgccgacgtgtgcgccctgtgacgcgcgatagataacctcgacctcgccggtatggatattcacacgctcaatggtctcgccggtaaacgacgcgccagaaggacgcacgtcaaataccagccactggctgtcgggcgtccaggtattggtattggtgagcaggtgattacggggagcaaaggttatctgtttcatggcgcggtcctgatacaaaacgggtcccgccatcatacttcacaaggacttcactttcagacaatagtcttttgccatcgtgatgaatgtgagtgaaaagatggaacatttcgacgtggcgattattggcctcggcccggcaggatcggcgttggcacgaaagttagcaggcaaaatgcaggtgatcgcgctggataaaaagcaccagtgtggtactgaaggtttcagcaaaccctgcggcggtctgctggcaccggacgcgcagcgatcttttattcgcgatgggctgacgcttcctgtcgatgtgatcgctaatccgcagattttcagcgtcaaaaccgtcgacgtcgccgcatcgctcacgcgtaactaccagcgaagctatatcaatattaatcgccatgctttcgacttgtggatgaaatcgctgatccccgccagcgttgaggtttatcacgacagcctgtgccgaaaaatctggcgtgaggatgataaatggcatgtcatttttcgtgcagacggctgggagcaacatattaccgcccgctatctggtcggtgccgatggcgcaaactcgatggtgcggcgacatctctacccggatcatcaaatccgtaaatatgtcgctatccagcagtggttcgcggagaaacatccggtgccgttctactcctgcatctttgataattcgataactaactgttattcatggagtatcagcaaagacggttattttatctttggcggtgcctatccaatgaaagacggtcagacgcgtttcacgacgctgaaagagaaaatgagcgcctttcagttccagtttggtaagacggtgaaaagcgaaaaatgcacggtgctgtttccctcgcgctggcaggattttgtctgcggtaaggacaacgcctttctgattggtgaagcggcgggatttatcagcgccagctcgctggaggggattagctatgcgctggatagcacagacattctgcgttcggtgttactgaagcagccagagaagctcaataccgcttactggcgcgccacccgcaaactgcgtttaaaactcttcggcaagatagtaaaaagccgatgcctgaccgcaccggctttaagaaagtggattatgcgcagtggtgtggcacatattccacagttgaaggattagccaacgcgcttcacatcgcccaccagcaggatataagagagcgcgccaatcaacgcgacggcggagatataaaccagtgcaggtgcgaaaccgtaaccctgcgccaggtaccccaccaccagcggaacggtgatgccgcccagaccaccggcgaagttaaacacgccgccggttaaaccaatcaggcgcatcggtgccagagaagaaaccagcgaccaggtaatcgaagcaaaaccgttaccgaagaatgccagcgccatcaggcacataatcatcatcggatcgttagtgtagttagcgcccataatgcaggtggagatcagcaagccgcagataatcggcgttttacgcgcaaagcccagtgaaaagcccttacgtaccagcagatccgctacccagccagagagcaggacgccgacaaacgccgcgaggaatggcaccgtggtcataaagcctgctttcagcgccgtgattcctttttcctgggttaaatagttcgggaaccaggttaagaaaaaccacagtgtagaagccaccgcaaattgcccaagataaacgccgatcagtttacgatggaacaccagtttccagtctttggctgttaacggctgacgcgcctctttcttcaccggcgcatcaccatccaccagaccgccgccatcacgaatgtaatccagttcagctttgctgatacctttggtcaggcgcggcggctgataaaccttaaaccaaatcagcgaccagataatgccgataccaccagtgacaatgaacacccagtgccagctcaacatctcctgaatccagatcagcagcggcgtcagaaacgccagaccgacaaactgaccagacgtataaaaaccaacggcagaagcgcgttcatgttccgggaaccagctggtcaccatccggttattggtcgggaaagcaggcgcttcgaaaataccggttatcgcgcgcagaccaattaatgacattaagcccgtggcaaagccctggaataaagtcgccactgaccagccaaatatcgcaataaaataagtcacgcgagaacctacgcgatctaaaaaccaaccgccggggatctgacatagcgtataaagccaggcgaaggccgaaaatacatagcccatttccgctttggtaatgccgaactcttcctgaatatgggcggaagccacggccaggttggcgcggtcgacataacaaatgactaccgtaataaagatcatcaccagcgtcagataacgccgacgccccggctttgctgcattaacgggaatatccatagcgagctttctccagattttgggcatagcgaagccgctcaccatgccctgtaatttacagagggttatatttttgtattgctgttttagtgcccgatgaggggcttacgtggcaggaattaccactctgctacgctgttatcttcatgacgccagagcggattacgccagtccggggcatttttactgaactcaatcactttagcttcgtcgatttccacgcctaagcccggtttcgttaacggtttaaagaagccgccgaccatgctgaagtcttctttgtttttcacaaagtcgagtaactccgcgcctttgttgtaatgaattcccatactttgttcctgaagtacggcgttataggaaacaaagtcgatatgcaggcaagccgccagtgcaatcggtccgagcggacagtgcggcgcaagggtcacgtcataggcttctgccattccggcgattttgtagcattcggtaataccgcccgcgtgggagagatccggttgcagaatcgaaataccacctgcctccagcacgcgtttaaaatcgaagcgtgagaacatgcgttcacccgccgccagtggaatatgcgtttgtgccgccagtttcgggtagtattcggcttgttccgccagcaccggctcctcaataaacagcgggcgatacggctccagttctttaatcagcactttcgccatcggcgcgctgacgcgaccgtggaaatcaagaccaaactcaatctgattgccaaaagcttcacgaatttgtgccacggtgttaaccgccgcatctaccgcgcgggagttatcaattagccccagttcttcacaaccgttcagtttgaaggtatcgaagccgatttcgcgtagcgttttaatgccgtcgataacatccgccggacgatcgccgccaacccaactgtaggctttaattttgtcgcgaaccaggccgcccatcagttgccagaccggcgcattcagcactttacctttgatatcccataacgcctggtcaatcccggcgatggcgctcatcaggatcggaccgccgcgatagaatccggcgcgatacatcacttgccataagtcattgatgcgcgatggatcctgaccaatcaaatagtcacccagctcgtgaactgccgcttccaccgtacgggcgcggccttcgatcacgggctcgccccaaccgaccacgccttcatcggtttcaattttcaggaacatccagcggggaggtaaacgatacgtggtaattttggtgattttcattgcacctgcctctcgatacgccttaacaaatgctgctgcctgctgcgcggtgcgctctacggattgcccggcgcgatagagatcgctgcctaagcccgcccctgcacaacctgcgtctatccactgcgccaggttttctgcgtcacgccgccaacggcaaagactgcgatgtccgatggcaataccgcttttaacgctttgatgtattgcggaccaaaagccgatgacggaaatattttcagcgcctgcggcgcccgcttcgagcgcggtaaaggcttcggtcgccgtcgcgcagccggggcagacggtcatgccgtagcccaccgcacggcggatcacttcactatggatattgggcgtaacgatgagctgacagcccatcctggcgagcgcatcgacctgttcaggtttcagtaccgtacctgcgccaatcaacgccttgtcgccgtacgcatcaacgatggcgggaatgctttgctcccattgtggggaattcagcgggatttcaaccgcgtcgaacccggcgtcaatcaccgcgccaacatgcgccagcgcctcgtcgggcgtaataccgcgcaaaatggcgatcagcgggagtttagtttgccactgcatgagcgatgctccttataccagcctgaaatgccgtgtcgcccgccaccgccgtcacgtcgcaacccatcgcctgaaaggcttgctggtagcgcgcggtcagcgatgttccggcgacaagggtgatggcgtgttgatgggccacatagtcgcgcatactggcgacctctgcgccaatcaacaaaccagagagaaattcgctgacctgttcgcggggaagtgttcccagcacatgcgaggcgcgaacttcaaaaagctgcggcaatatggcgggcgtattaagaccacgctcaaggccagctgtgaaggcatcggcagagttttcctgcggcggcaaacctgcgccaatcaatgagtgatttaacagtaaatgatgtaattcaccggtcatcacggtgcgaaaatcgttgatttgctggctatcggcctgcacccatttgcaatgggttccgggcatgacataaagagaggaaggagccagagctcgcgcgccgatcaattgtgtttcttcgccgcgcatcacattgtggttatcgtcatgagagacacataatccgggaataatccagatattgtcgccaactgacgttaattgttcgccaatagacgaaaaacaggcaggaacagataaatacggtgcaactttccagccgacgttgctgccaaccattcctgccattaccactggcgttttctcttcacgccagtcggtcgtgacttctgctaacaccgcagccggagattttccgttcaggcgcgtgacgcctgcttctgattgcctgctctccaggcagtggtcgccctgataaagccaggcgcgcagattggtcgatccccagtcaattgcgatgtagcgagctgtcatgtgatttcctttaaccttcgtgtcgagctggcgatcatggtaagcgccgcctgctctgccgcatcgccgtcctgatgtcgtatcgcatcgaacagcgccttatgttcctggagcgtttgcggcatgttggcctcatcgcccatccaggttcgttcaaaaaccgcccgctgcagcgaactgatcgcaatgctaagttgctgtaacaccgggttatgcaccgactgcagcaccgcctcgtggtagcgaatatccgcttcgttaaacgcttcgcggtcctgattgttggcaatcatctcgttcagcgccgattcaatctgcgccagatcgctggaagtcgcgcgctctgctcccaacgggcaatcgccggttccaccagatttcgcacttcgctcatggcactgataagccgtgggtcgtagtcattttccagcacccattgcagtacgtcagtgtcgaggtaattccactggttacgcggtgccacaaacgccccgcgataacgtttcatttcaatcagccgcttcgccatcagcgaacggaacacctcacggatgatgttgcgcgaggttgcaaactcctcacagagttccgcctcagccggaagcggcgagcctggcacgtatttgccgtgaacgatctgtttacccagcgtaatgacaatgcgatcggttttattgagagtcatggagagtccttgtgctctgtatgttcttctctactttaccccgatcgatgcataacgcggcaactttgtagtaccagcgtgatgacgttcgcgtttgccgtgcgtgtaatgtagtacaaacttatattgttgtactacaatttagatcacaaaaagaacaatgcataaaaaaatgacatgcgtcgggcagaaatctgaaaagggatatcaggcgctaaacaggagggaaagaagagtatgctttcaacggcttagctactcgtttaaaggattaatcatgaagttgaattttaagggattttttaaggctgccggtttattcccactggcgctgatgctttcaggctgtatctcgtatgctctggtttcccataccgcaaagggtagttcaggaaagtatcaatcgcagtcagacaccatcactgggctatcgcaggcaaaagatagtaatggaacaaaaggctatgtttttgtaggggaatcgctggattaccttatcactgatggtgccgatgacatcgttaagatgctcaatgatccagcacttaaccggcacaatattcaggttgccgatgacgcaagatttgttttaaatgcggggaaaaagaaatttaccggcacaatatcgctttactactactggaataacgaagaagaaaaggcactggcaacgcattatggttttgcctgtggtgttcaacactgtaccaggtcactggaaaacctaaaaggcacaatccatgagaaaaataaaaacatggattactcaaaggtgatggcgttctaccatccatttaaagtgcgattttatgaatactattcacccagaggcattccgggatggtgtttccgcagcattactgccagtgactgttacgctggacatcattactgcaccgctgcaatttctggttgtatatgcagtaaaccaataatcagtaagcgggcaaacgcgtttatgctgtttgcccgcccacagattaattcagcacatacttctcaatagcaaacgccacgccatcttcaaggttagatttggtgacaaagttcgccacttctttcactgaaggaatagcgttatccatcgccacaccgacgcctgcatattcaatcattgcgatatcgttttcctgatcgccaatcgccatgatttcttccggtttaatacctaacacgtcggccagtgatttcacccccgtacctttgttaacgcgtttatcgaggatttcgaggaagtacggcgcacttttcagcacggtatatttctctttcacttcctgcggaatacgcgcgatagcctggtcgaggatggcgggttcatcaatcatcatcactttcaggaactgggtattggggtccattttctccgcttcgcagaacaccagcggaatggtggcaacgaaggattcatgcaccgtgtagtagctgatatcacggttggcggtgtacagcgtggtgcggtccagggcgtggaaatgagaaccgacttcgcgagagagtttttccaggaaacgatagtcgtcatagctgagagcagtttgcgccacggtgctaccatcagcggccttctgtaccagcgcgccgttataagtaatgcagtagtcgcccggctgttccatatgcagctctttcaggtagttgtgcacacctgcatacgggcgacccgtcgttagcacgacattcacgccacgggcgcgagctgcggcaatcgcatttttaacggcgggtgaaatggtgtgatcgggcagcagaagggtgccatccatatcgatagcaatgagtttaatagccatgagttccccaggtagattggttcctgacccatgctaacgcgattccgctcaaaaatcagtacaacacccgagggaaaagggggatgcaacgcgcgttgcgtgctccctttttgcttagcggaagagtttccctttcagcagttccatgcctgcggaaagcagatcgttattggcttgtggtgacacttcaccttgcggtgagagcgcatcaataatcttcggcaattgttctgccagtaaactggaagctgtactggtatccacgccaagtttttgcccgagatcggacaccgcatttgtgccgagcgccgattccagttgctcgccactaaccgattgattgccctgttgattactcagccaggttgagagaatggcccctaagccgccactttgcagtttttccagcagcacctgaatgccgccctgctcctcaacccaacttaaaatagcctgatatttccccgcatcgcctttcagaaaggcaccgacaacttcatcaaaaagccccatgataatcacctgtaaagcgttacgtgttgacccaaaaagtatagatttgcgggatgataattgcggattgcagaaataaaaagggcggagatgatctccgcccttttcttatagcttcttgccggatgcggcgtgaacgccttatccggcctacaaaatcatgaaaattcaatacattgcaagattttcgtaggcctgataagcgtagcgcatcaggcacgctcgcatggttagcgccattaaatatcgatattcgccgctttcagggcgttctcttcaataaacgcacggcgcggttcaacggcgtcgcccatcagcgtggtgaacaactggtcggcagcaatcgcatctttaacggtaacgcgcagcatacgacgactttccgggtccatagtggtttcccacagctgttccgggttcatctcgcccagacctttataacgctggatggagaggccgcgacgggactctttcaccagccagtccagcgcctgctcgaagctggctaccggctgacgacgctcgccacgttcgataaacgcatcttcttccagcaagccacgcagtttctcacccagcgtgcagatacgacgatattcgccaccggtgataaactcgtgatccagcggatagtcagtatccacaccgtgggtacgcacgcgaacaatcggctcgaacaggttttgctcagcattggtgtgaacatcaaacttccactggctgccgtgctgttctttgtcgttcagttcgctgaccagcgcgttcacccagcgggtaacggtctgctcatcagaaaggtcagcttccgtcaacgtcggctgatagataagctctttcagcattgctttcggataacgacgctccatacgattgatcattttctgcgtcgcgttgtactcagataccagtttctctaacgcttcgccagccaatgccggtgcactggcgttggtgtgcagcgttgcgccgtccagcgcgatagagatctggtactgatccatcgcttcgtcgtctttaatgtactgttcctgcttgcctttcttcactttgtacagcggcggctgagcgatgtagacgtgaccgcgttcaacgatttccggcatctgacgatagaagaaggtcaacagcagcgtacgaatgtgcgagccgtcgacgtccgcatcggtcatgatgatgatgctgtgataacgcagtttgtccgggttgtactcgtcacgaccgataccacagccaagcgcggtgataagcgtcgccacttcctgagaagagagcatcttatcgaagcgcgctttctcgacgttgaggattttacccttcagcggcagaatcgcctggttcttgcggttacgcccctgcttcgcagagccgcccgcggagtccccttccaccaggtacagttcggaaagcgccggatcgcgttcctggcagtctgccagtttgcccggcaggcccgctaagtcgagcgcacctttacggcgggtcatttcacgcgcgcgacgcggcgcttcacgggcacgggcagcatcgataattttgccaaccacgattttcgcgtcggttgggttttccagcaggtattctgccagcagttcgttcatctgctgttcaaccgccgatttcacctcagaagaaaccagtttgtctttggtctgggaggagaatttcgggtccggcactttcacggaaacgaccgcaatcaggccttcacgcgcatcgtcaccggtggcgctgactttggcttttttgctgtagccttctttgtccatgtaggcgttcagggtacgggtcatcgccgcacggaagcctgccaggtgagtaccgccgtcacgctgcggaatgttgttggtaaagcagtagatgttttcctggaagccatcgttccactgcaacgccacttcgacgccaataccgtctttttcagtggagaagtagaagatattcgggtggatcggcgttttgttcttgttcagatattcaacgaacgccttgatgccgccttcatagtggaagtggtcttctttgccgtcgcgcttgtcgcgcagacgaatggaaacgccggagttgaggaacgacaactcacgcagacgtttcgccagaatttcatattcgaactcggtcacattggtgaaggtttcgaggctgggccagaaacgcaccatggtgccggttttttcagtctcgccggtaaccgccagcggggcctgcggtacaccgtgttcgtagatctgacggtgaattttaccctcgcgctggataaccagctccagtttttgcgacagggcgtttactaccgaaacaccaacgccgtgcagaccgccggacactttataggagttatcgtcaaatttaccgcctgcgtgcagaacggtcatgatcacttccgccgccgatacgccctcttccgggtgaataccggtcggaatgccgcgcccgtcatcctgtacagagacagagttatcggcgtgaatggtgacgataatttctttacagtgacccgcgagcgcttcgtcgatagcgttatctaccacctcgaataccatgtggtgcagaccggtgccgtcatccgtgtcgccgatatacatacccgggcgcttacgcaccgcatccagccctttcaggactttgatactggaggagtcataagaattcgacatcaacgtttctcgctcatttatacttgggttaatccgttattttacccttttccacggtaaacatcttcgaattttcgtccgacatgtctataacgtgttcagcactgatcgcgctgacaaagacctgtgattgcgtcgcttttaagcggctggcaagcagcccgcgacgctcatcatcaagctcagaggcaaaatcatctatcaggtagagacaccgccgcccgctttcacgggtgaggaactctccttgcgccagacgtaaggcgcacatcaacagcttaagctgcccacgcgataaggtatcttccaccggcgcaccgtcggcgcgaatgcgtaagtccgctttgtgcgggccgtgcgcggtgtaggttagctggcgatcgcgttcaaaattacgttccagcacctcagcatattctgtctctttctcccagccgcgctggaaagagaaagtcagagaaaactcagggagaaattgcttacaggtatcagccatatcggccgcgataccggcgctatactccgcgcgccaggtgctgatttgctccgccagcgggatcagctctttatcccacgggcgtagctgttcgtaacgtgtcacctggcgcagcgccgcattgcgctgcttgagcaatcgcttgagattgctccaggcggtgaaaaatccgggttcgttgtgaaagcatccccagtcgaggaatgctcttctgtatttggggccgccgttgagtaaagtaaacccttctggcgttatcaactgcattggcatcaggtgcgccagttccgcgaccttatgcccgtctgtaccgtcgatgcggactttgctgtcgccctgtttgtctttggttaagccaatcgctgtctcgcgctcttcgccctgtaatcgcccgtggagaacaaacgcctcctgctcatggcgaatgacgcgaccaatctgcaaactgcgaaacgcccgaccatggccgagcgtatagatggcttccagcacgctggttttgccactgccgttggcacctaccagaaagttaaagccgggagataaggcgagatccgcggtttcaatgttgcggaaatcgcggatcaacaagcgggtgagggacattacagtctcattggcatgacaacataagccgcgctctggctggccgcatcttcaatctgcacgctggaaaccgaatcggtcagcatcatgcggacgttttcgcatttcagcgcgttcagaacatccagcacataactgacgttgaagccgatttccatctccgcaccgctataggtaacgtcgaggatctcttccgcttcttcctgttccgggttgttggcggtgattttcagctggttttcgctgacataaagacgtacgccgcggaatttctcgttagagagaatcgccgcgcgagcaaacgcctgcttgagcagatcgcagccagcttccagatgtttgtccgggttcttcggcagaacgcggcgataatccgggaagcgaccatccaccagtttggaggtgaagataaagtcgccaacgtgggcgcgaatgttgttgctgccaatctgtacgcgcagcggattgtcgccgccgtcgagcatacgcatcagttcaatcacgcctttacgcggtacgatcaccgaatggcttggcaaagattgaccaattggcattgaacagaccgccagacggtggccgtcggttgccacggtgcgcagttcttcaccttcggtttcaaacagcataccatttaagtaatagcgaacgtcctgatgcgccatagaaaactgggtcgcttcaatcagacgcttcatcgttgcctgcggcagggtaaattcgacttcactctgccagtcatcgaggttcgggaaatccgccgctggcagggtagacagcgaaaaacggctacgcccggagcgtaccagcatccgttcaccttccagctgcacggcaatttccgcgccttcaggcagaccacggcagatatcaaagaatttgcgcgccggaacggtcgtcgctcctggctcgtgtggctgaaccagcgcaacacgtgccaccatttccatctcgagatcagtaccggtcagcgacaacgtaccgtcagcaacctgtaacagcagattaccgagaatcggtagcgtaggacgaccacctaacggaccgctcacctgttgtagcggttttaataaatgctcacgttctacggtaaatttcataggtttacgatgacaatgttctgattaaatttgaaaaatcttctttgatatcgtggctctcttcacgcaactgctcgatcttacggcaggcatgaagcaccgtcgtgtggtcacggccaccaaacgcatcgccaatctccggcagactgtggttagtcagctctttcgccagcgccatcgccatctggcgcggacgcgccaccgagcgggatcgacgcttggaaaggagatccgcgactttgatcttgtagtactccgccaccgtcttctgaatattgtcgatggtgaccagtttttcctgcaatgccagcaagtcgcgcagcgcctcacgcacgaagtcgatggtgatcgcccgtccggtaaagttggcattggcaatgacgcggttcagcgccccttccagctcacgtacgttagatcgtagacgcttggcgataaagaacgccacttcgcccggcaaacgaatgtcgttttcgtcggcctttttcatcaggatcgccacacgggtttccagctctggcggttcgatcgccacagtcagtccccaaccgaagcgggatttcaaacgatcctcaacgccgttgatctctttcggatagcgatccgaggtgagaatgatctgttgattaccttccagcagggcgttgaaggtgtggaaaaactcttcctgagatcgttctttattagcaaaaaactgaatatcgtcgatcagcagtgcatctacggaacggtagtagcgtttaaactcttcgatcgcgttgttttgcagggctttaaccatgtcctgaacaaagcgctcggagtgcatataaaccactttggcattcggcttgcgcgccataatgccgttacccaccgcatgcagcaggtgagttttacccagacccgtgccgccataaaggaacaacgggttataggcaccgccagggttatccgccacctggcgagccgccgcgcgcgccagttggttagatttaccttcaacgaagttatcaaacgtgtgtttgacgtttacgttagaacgataggtcggttctgccggggccgggacgttatcccaacctgagcgcgtagaaggcgcagcacgttgcggctgcgtttgcgccacctgtgcaggggccgcgacgttgctcgtcactgccgcttgtggcgtttgcgtcaccggtttggtgccgacttcaaaacgcagctgtggggcatccgctccgcagaaactggttagcagtccattgatattattaaggtacttgtcccgtacccaatcgaggacaaaacggtttggcgcgtacagggccagcgtgttatcgctcagttccgcctgcaatgggcgtatccacatactgaattctgtggctggtaactcatcctgcaatcgggcaagacactgctgccaaagcgaaagtgacacggcggactccactcgaacaaaagtcgataatgactaaggctgaaacattcatgattgttgacgtacgtcgaaaagaccctgcttgagggtgacgcacgaaccgctgtctgcggttatatgcccgagtcaagatcctgcaaaacgatcgggaccgcggatcatagcctaaactgcgcaagagatcttctgtttctcacagattttcccgatttatccacaggactttccagaactcgctaagtgtaaacgatcctgccgcgaggcgggcacgatttacgccgcatattggaaaatttaatgaccatagacaaaaattggcttaatcgatctaataaagatccaggacgatccttgcgctttacccatcagcccgtataatcctccacccggcgcgccatgctggtttccactggtgtgaggtcgtacattttccctgcgaaaaggtgcggaaaagcgcggtaaataaggaaagagaattgactccggagtgtacaattattacaatccggcctctttaatcacccatggcttcggtgtccatcgtttcatttttcggcggatatccaataaagccattgaatttattcaagtttaggtagaaatcgccatgaaacgcacttttcaaccgtctgtactgaagcgcaaccgttctcacggcttccgtgctcgtatggctactaaaaatggtcgtcaggttctggcacgtcgtcgtgctaaaggccgcgctcgtctgaccgtttctaagtaataaagctaacccctgagtggttaagctcgcatttcccagggagttacgcttgttaactcccagtcaattcacattcgtcttccagcagccacaacgggctggcacgccgcaaattaccattctcggccgcctgaattcgctggggcatccccgtatcggtcttacagtcgccaagaaaaacgttcgacgcgcccatgaacgcaatcggattaaacgtctgacgcgtgaaagcttccgtctgcgccaacatgaactcccggctatggatttcgtggtggtggcgaaaaaaggggttgccgacctcgataaccgtgctctctcggaagcgttggaaaaattatggcgccgccactgtcgcctggctcgcgggtcctgatagccctcattcgggtctatcaacgcctgattagtccgctactcgggccgcattgtcgtttcactccaacctgttcaagctacggaattgaggcattgcgcaggtttggagtgataaaaggcagttggttgacggtgaaacgcgtattaaaatgccaccctttacaccctggtggtgacgatcccgtcccgcccggaccatttgataccagagaacactaacgatggattcgcaacgcaatcttttagtcatcgctttgctgttcgtgtctttcatgatctggcaagcctgggagcaggataaaaacccgcaacctcaggcccaacagaccacgcagacaacgaccaccgcagcgggtagcgccgccgaccagggcgtaccggccagtggccaggggaaactgatctcggttaagaccgacgtgcttgatctgaccatcaacacccgtggtggtgatgttgagcaagctctgctgcctgcttacccgaaagagctgaactctacccagccgttccagctgttggaaacttcaccgcagtttatttatcaggcacagagcggtctgaccggtcgtgatggcccggataacccggctaacggcccgcgtccgctgtataacgttgaaaaagacgcttatgtgctggctgaaggtcaaaacgaactgcaggtgccgatgacgtataccgacgcggcaggcaacacgtttaccaaaacgtttgtcctgaaacgtggtgattacgctgtcaacgtcaactacaacgtgcagaacgctggcgagaaaccgctggaaatctcctcgtttggtcagttgaagcaatccatcactctgccaccgcatctcgataccggaagcagcaacttcgcactgcacaccttccgtggcgcggcgtactccacgcctgacgagaagtatgagaaatacaagttcgataccattgccgataacgaaaacctgaacatctcttcgaaaggtggttgggtggcgatgctgcaacagtatttcgcgacggcgtggatcccgcataacgacggtaccaacaacttctataccgctaatctgggtaacggcatcgccgctatcggctataaatctcagccggtactggttcagcctggtcagactggcgcgatgaacagcaccctgtgggttggcccggaaatccaggacaaaatggcagctgttgctccgcacctggatctgaccgttgattacggttggttgtggttcatctctcagccgctgttcaaactgctgaaatggatccatagctttgtgggtaactggggcttctccattatcatcatcacctttatcgttcgtggcatcatgtacccgctgaccaaagcgcagtacacctccatggcgaagatgcgtatgttgcagccgaagattcaggcaatgcgtgagcgtctgggcgatgacaaacagcgtatcagccaggaaatgatggcgctgtacaaagctgagaaggttaacccgctgggcggctgcttcccgctgctgatccagatgccaatcttcctggcgttgtactacatgctgatgggttccgttgaactgcgtcaggcaccgtttgcactgtggatccacgacctgtcggcacaggacccgtactacatcctgccgatcctgatgggcgtaacgatgttcttcattcagaagatgtcgccgaccacagtgaccgacccgatgcagcagaagatcatgacctttatgccggtcatcttcaccgtgttcttcctgtggttcccgtcaggtctggtgctgtactatatcgtcagcaacctggtaaccattattcagcagcagctgatttaccgtggtctggaaaaacgtggcctgcatagccgcgagaagaaaaaatcctgattcggtgagttttcgctaaaataagggcggtcagttgaccgccttttttcttttcgtagggcggataagcaccgcgcatccgccacacaaagcaacaggaacatcatgagcgataatgacactatcgtagcccaggccacgcctccgggacgtggcggcgttggcatcctgcgcatctccggcttcaaagcccgtgaagttgccgaaaccgtgctgggtaaactgcctaagccgcgctacgccgattatcttccgtttaaagacgccgacggcagcgtgctcgatcaggggattgcgctatggttccctggcccgaactcgttcaccggcgaagatgtgctggaactgcaaggtcatggcggtccggtgatcctcgacctgctgttaaaacgcattctgaccattcccggcctgcggattgctcgccctggtgagttttccgaacgcgcgtttcttaacgataaacttgacttagcccaggccgaggcgattgccgatcttatcgacgccagttcggaacaggcggcccgttcggcacttaactcgctgcaaggcgcattctccgcacgggttaatcatctggtagaagccctcacccacttgcgcatttacgtcgaagcggcaattgatttccccgatgaagagatcgatttcctctccgacggaaaaattgaagcccagctcaatgacgttattgccgatcttgatgcagtgcgtgctgaagcacgtcagggtagtttgttgcgcgaagggatgaaagtggtgattgccggacgtcctaacgccggtaaatcgagcctgttaaacgcgctggcggggcgtgaagcggcaatcgtaaccgatatcgccggaactacgcgtgacgtgctgcgtgagcatatccacattgacggaatgccgctgcatatcatcgataccgccgggctacgtgaagccagtgacgaagtagaacgtattggtatcgagcgcgcgtggcaggaaattgaacaggccgaccgcgtgctgtttatggtcgatggcaccacaacagacgccgtggatccggcagagatctggccggaatttattgcccgtctgccagcgaaactgccgatcaccgtggtgcgcaataaagccgatatcaccggcgaaacgctgggaatgagtgaagtgaacggtcacgcgttaattcgtctctcggcaaggactggtgaaggcgtggacgtgctgcgtaaccatctcaaacagagcatgggctttgacaccaacatggaaggcggcttcctggcgcgtcgtcgccacctacaggcgctggaacaggcagcggaacatctacaacagggcaaagcgcaactgttgggagcctgggcaggtgaactgctggcggaagagttgcgtctggcacagcagaacttaagcgaaatcaccggggaatttacttcagacgacctgctggggcggattttctccagcttctgtattggtaagtaaccgcgcttacgaagccgcattctgactgtcagatgcggcttcgcttcattgttaccactcctgttattcctcaaccctttttttaaacattaaaattcttacgtaatttataatctttaaaaaaagcatttaatattgctccccgaacgattgtgattcgattcacatttaaacaatttcagaatagacaaaaactctgagtgtaataatgtagcctcgtgtcttgcgaggataagtgcattatgaatatcttacatatatgtgtgacctcaaaatggttcaatattgacaacaaaattgtcgatcaccgcccttgatttgcccttctgtagccatcaccagagccaaaccgattagattcaatgtgatctatttgtttgctatatcttaattttgccttttgcaaaggtcatctctcgtttatttacttgttttagtaaatgatggtgcttgcatatatatctggcgaattaatcggtatagcagatgtaatattcacagggatcactgtaattaaaataaatgaaggattatgtaatggaaaactttaaacatctccctgaaccgttccgcattcgtgttattgagccagtaaaacgtaccactcgcgcttatcgtgaagaggcaattattaaatccggtatgaacccgttcctgctggatagcgaagatgtttttatcgatttactgaccgacagcggcaccggggcggtgacgcagagcatgcaggctgcgatgatgcgcggcgacgaagcctacagcggcagtcgtagctactatgcgttagccgagtcagtgaaaaatatctttggttatcaatacaccattccgactcaccagggccgtggcgcagagcaaatctatattccggtactgattaaaaaacgcgagcaggaaaaaggcctggatcgcagcaaaatggtggcgttctctaactatttctttgataccacgcagggccatagccagatcaacggctgtaccgtgcgtaacgtctatatcaaagaagccttcgatacgggcgtgcgttacgactttaaaggcaactttgaccttgagggattagaacgcggtattgaagaagttggtccgaataacgtgccgtatatcgttgcaaccatcaccagtaactctgcaggtggtcagccggtttcactggcaaacttaaaagcgatgtacagcatcgcgaagaaatacgatattccggtggtaatggactccgcgcgctttgctgaaaacgcctatttcatcaagcagcgtgaagcagaatacaaagactggaccatcgagcagatcacccgcgaaacctacaaatatgccgatatgctggcgatgtccgccaagaaagatgcgatggtgccgatgggcggcctgctgtgcatgaaagacgacagcttctttgatgtgtacaccgagtgcagaaccctttgcgtggtgcaggaaggcttcccgacatatggcggcctggaaggcggcgcgatggagcgtctggcggtaggtctgtatgacggcatgaatctcgactggctggcttatcgtatcgcgcaggtacagtatctggtcgatggtctggaagagattggcgttgtctgccagcaggcgggcggtcacgcggcattcgttgatgccggtaaactgttgccgcatatcccggcagaccagttcccggcacaggcgctggcctgcgagctgtataaagtcgccggtatccgtgcggtagaaattggctctttcctgttaggccgcgatccgaaaaccggtaaacaactgccatgcccggctgaactgctgcgtttaaccattccgcgcgcaacatatactcaaacacatatggacttcattattgaagcctttaaacatgtgaaagagaacgcggcgaatattaaaggattaacctttacgtacgaaccgaaagtattgcgtcacttcaccgcaaaacttaaagaagtttaattaatactacagagtggctataaggatgttagccactctcttaccctacatcctcaataacaaaaatagccttcctctaaaggtggcatcatgactgatcaagctgaaaaaaagcactctgcattttggggtgttatggttatagcaggtacagtaattggtggaggtatgtttgctttacctgttgatcttgccggtgcctggtttttctggggtgcctttatccttatcattgcctggttttcaatgcttcattccgggttattgttattagaagcaaatttaaattatcccgtcggctccagttttaacaccatcaccaaagatttaatcggtaacacctggaacattatcagcggtattaccgttgccttcgttctctatatcctcacttatgcctatatctctgctaatggtgcgatcattagtgaaacgatatcaatgaatttgggttatcacgctaatccacgtattgtcgggatctgcacagccattttcgttgccagcgtattgtggttaagttcgttagccgccagtcgtattacctcattgttcctcgggctgaagattatctcctttgtgatcgtgtttggttcttttttcttccaggtcgattactccattctgcgcgacgccaccagctccactgcgggaacgtcttacttcccgtatatctttatggctttgccggtgtgtctggcgtcatttggtttccacggcaatattcccagcctgattatttgctatggaaaacgcaaagataagttaatcaaaagcgtggtatttggttcgctgctggcgctggtgatttatctcttctggctctattgcaccatggggaatattccgcgagaaagctttaaggcgattatctcctcaggcggcaacgttgattcgctggtgaaatcgttcctcggcaccaaacagcacggcattatcgagttttgcctgctggtgttctctaacttagctgttgccagttcgttctttggtgtcacgctggggttgttcgattatctggcggacctgtttaagattgataactcccacggcgggcgtttcaaaaccgtgctgttaaccttcctgccacctgcgttgttgtatctgatcttcccgaacggctttatttacgggatcggcggtgccgggctgtgcgccaccatctgggcggtcattattcccgcagtgcttgcaatcaaagctcgcaagaagtttcccaatcagatgttcacggtctggggcggcaatcttattccggcgattgtcattctctttggtataaccgtgattttgtgctggttcggcaacgtctttaacgtgttacctaaatttggctaaatccttcaagaagccagccattcgctggcttcttgcctctcaggaaatcacttatgtccaaatggcaactcgcctgatcctccttcaccacgtatgctttgcgtcaccttactatcaggacgctttagcccatgtcccgctttttgatttgtagttttgccctggttttactttatcccgccgggattgatatgtacctcgttggtttaccgcgcatcgccgccgatctcaatgccagcgaagcgcagttgcatattgcgttctccgtatatctggcggggatggcagctgcgatgttatttgccggtaaagtggccgatcgttcagggagaaagccggtcgccatacccggcgcggcgctatttattattgcctcggtgttctgttcactggctgaaaccagcacgttatttcttgcaggccgatttctacaggggttgggcgcaggctgttgttacgtagtggcgttcgctattttgcgcgacacgctggatgatcgacgtcgggctaaagtgctgtcattactcaacggtattacctgcatcattccggtgttagcgccagtgctcggacatctgattatgcttaaattcccgtggcagagtctgttctgggcgatggcaatgatgggcatcgcggtactgatgttgtctttgtttattttaaaagaaacgcgcccagcggcccccgcagcttcggataaaccacgagaaaatagcgagtcgctgcttaaccgttttttcctcagccgtgttgttatcaccaccctcagcgtttcggtgatcctcactttcgtcaacacgtcaccggtattgctgatggaaatcatggggtttgagcgcggtgaatacgccaccattatggcgctgaccgctggcgtcagcatgaccgtttcattctccacgccatttgcgctgggaatttttaagccacgtacgttgatgatcacctcgcaggtgttattcctggcggcggggatcactcttgccgtttcaccttcccatgcggtttctctgtttggtatcacgctgatttgcgccggtttctcggtaggttttggtgtggcgatgagtcaggcgttagggccgttttcattacgcgcgggcgtagccagctcgaccttaggtattgcgcaggtttgcggttcgtcactgtggatttggctggcagcggtggttggtatcggcgcatggaatatgctgatcgggattctgattgcctgtagcatagtgagcctgttgctgattatgttcgtcgcgcctggacgccccgttgccgctcatgaagaaatccatcaccacgcttgatctcaatctgctgctttgtctgcaactgctgatgcaggagcgcagcgtaaccaaagcggcgaagcggataaacgtgacaccttcggcggtgagtaagtcgctggcaaagttaagagcgtggtttgacgacccgctctttgtgaactcaccgctgggtctgtcgcccacaccgctgatggtcagcatggagcaaaatctggcggagtggatgcaaatgagcaacctgctgctggataaaccgcaccaccagacaccgcgcggcctgaagtttgagctggcggcggaatcaccgctgatgatgatcatgcttaatgcgctgtcgaaacagatctaccaacgttacccgcaggcgaccatcaaattacgtaactgggattacgattccttagatgccattactcgtggtgaagtggatatcggtttttccggtcgcgaaagccatcctcgctcgcgggagctgttaagctcgctaccgttagccattgattatgaagtgctgtttagtgatgtgccctgcgtctggttacgcaaagatcatccggcactgcatcaaacgtggaatctggacaccttcttacgttatccgcatatcagcatttgctgggaacagagcgatacctgggcgctggacaatgtgttacaggagctgggacgcgaacgcacgattgctatgagcctgccggaattcgagcagtcactgtttatggcagcgcaacccgacaatctgctactggcgaccgcgccgcgctactgtcagtactacaatcaactccatcaactgccgttggttgctcttcctctcccgtttgacgaaagccagcaaaaaaagctggaagttccttttaccctgctgtggcataaacggaacagccataatccgaagatcgtctggttacgggaaaccattaaaaacctttacgcgtcgatggcataaccgaatcgtatgaaacgcgacccaatttcacaataaaatgtaaaaaagttgtaataagcttgtctgaatcgaacttttagccgctttagtctgtccatcattccagtaaatgattactcttgtattcataatggaccattaagcatggagcgaaaaatggcgactcactttgcccgagggattttaacggaaggacatctgatttctgttcgtctcccctcccagtgtcatcaagaagcccgaaacattccccctcatcgtcaaagccgttttctggcgtccagaggtttactcgcagaactgatgttcatgctgtatggcattggcgaattgccggaaatcgtcaccctgccgaaaggtaaaccggttttcagtgataaaaatttgccttcgttttccatttcctatgccgggaatatggttggcgtggcgttaacaaccgaaggtgaatgtggcctcgatatggaactacagcgtgcgacgcgcgggtttcatagcccacacgcgcccgataaccacaccttttccagcaatgaatcgctatggatcagtaaacaaaacgatcctaacgaagcgcgggcgcagctcatcacgctgcgccgaagcgtgctaaaactaaccggtgatgttttgaatgacgatccgcgcgatctgcagctgctgcccattgccggacgcctgaaatgtgctcatgtaaatcatgtagaagcgttatgcgacgcggaagacgtgctggtgtggtccgtggcggtcacgcccacgattgaaaagctcagtgtctgggagttagatggcaaacacggctggaaaagcctgccggatattcacagccgcgccaacaatcctaccagccggatgatgcgttttgcccaactctctaccgtgaaggctttttcgccaaattgatagacaaccacaggagtcatcatgtctgaaaaattgcaggtggttacgttactggggagcctgcgcaaaggctcatttaatggcatggttgcacgtaccctgccgaaaattgctccggcgagcatggaagtcaatgcgttaccatccattgccgacattcccttgtatgacgctgacgtacagcaggaagaaggttttccagcaacggttgaagctctggcggaacagatccgtcaggctgacggtgtggtgatcgtcacgccggaatataactactcggtaccgggtgggctgaaaaatgccatcgactggctttcccgcctgccggatcaaccgctggccggtaaaccggtattgattcagaccagctcaatgggcgtgattggcggcgcgcgctgtcagtatcacctgcgccagattctggttttcctcgatgcaatggtgatgaacaagccggaatttatgggcggcgtgattcagaacaaagttgatccgcaaaccggagaagtgattgatcagggtacgctggaccacctgaccgggcaattgaccgcatttggtgagtttattcagcgagttaagatctaaataaaaaacccgccagcaatcatgcatggcgggtttttaacgcgctatcgattttagtgagcgtcgataaagacaatcttcaggataaacagcagcgcaacgatgattacgcacgggcttagatcacgcagacgtccggtaccgattttcatcacgcagtaggagataaagcccagcgcgataccttcggtaatcgagaagctgaacggcatcatcacggcggtaataaacgccggaacagattcagtaagatcctgccagttcacgcgtgccagactggaagtcatcagcacgccaacgtaaatcagcgcaccagctgcagcgtagcctggcaccatccccgccagcggcgacagaaagataaccagcaggaacagcagaccaacaaccactgccgtcagaccggtacgaccgccaaccgatacgccggaagaggactcaatataagccgtaacggaagaagtaccgataaacgaaccggtcacggaagagatactgtcgacatacagcgcctgcttcatgcgcgggaatttccccttctcatccgccagacctgctttatcggtcacgccaatcagcgtaccggaggagtcaaacaagttgaccaacatgaaagagaaaatcacccctgccagcccgaggttaaacgacccggctaaatctacatgacccacaactgtcattacgctcggcggcgcagaaacgatgccattgtagtgcacatcacccagcatccagcccagcagcgtcgtcaccacgatagaaaccagcaccgctgcgtgaatgttgcgcgaggccagaatagcaatgatgaagaagccgaggatacccagaagtacgctgtgagaagtcagattaccgatgctcaccagcgtttccgggttagcgacaatcacacctgcgtttttcagccccatcatgccaatgaacagaccgataccgctggtaatacccacacgcagactcaccggaatgttggctatcatccagtagcgaacgcggaaaatcgtcagtaacagcagacctatcgcgccccagaagattgcgcccatcccgacctgccacggcaagcccatcgcctgtacaacgacaaaagcgaagaacgcattcaggcccatagcgggtgccagtgcaactggcaggttagcaaacagtcccatcataatactgccgaatgcagcgatcagacaggtagtgacgaagacggcgctggtatccatgccagcaacgccaagaatttgcgggttaacaaaaacgatgtaaaccatcgtcaggaaggtggtaaaaccggcgatcacttcggtccgtgccgtcgtgccatgttcgcgcagtttaaacacgcgttccagcatcccctgaccagaagtctgggtggtatgttgatgactcattatctatttccgaacaaggagggaaaatccgtcgctatcgtataccaaaatgcgacaataggcgcgtttgtgagagacttttttattggatttacttatacggcaacgattgcgttgcgcaaatcggctctacgaaaacgttaaactgattaaaaaggaaaggcatgtcccggatagaagcggtatttttcgactgcgacggtacgctggtcgacagtgaagtcatttgctctcgcgcatatgtaacgatgtttcaggaatttggtattacgctcgatcctgaagaggtattcaaacgtttcaaaggtgtaaaactgtacgaaattatcgatattgtttcccttgaacatggtgttacgttagcgaaaacagaagctgaacacgtttaccgtgcagaagtcgctcggctgttcgattcagaactggaagccatcgaaggggctggagcgctcctgtcagcgatcactgcgccaatgtgtgtggtatctaacggcccaaataacaaaatgcagcattctatgggcaagctgaatatgttgcactacttcccggataaactgttcagcggctacgatattcagcgctggaagccagacccggcgttaatgttccatgcggcaaaagcgatgaatgtaaatgtagaaaactgcattctggttgatgactcagttgccggtgcacaatctggtatcgacgcaggtatggaagtgttctacttctgcgccgacccgcacaataagccgatcgttcacccgaaagtcaccacctttacccatctttcgcagttacctgaactgtggaaagcgcgtggttgggatattacggcatagttcttcacactcccttcacttaccccgcttaaattggcgctcaaaggtaagtaaagggagtttgatatgtctgtttcacgtcgggtaatacatcacggactttattttgcagttttaggaccgttaattggtgttctgtttcttgtcctctacatattcttcgcaaaagaaccgctggttctttgggtgataatacatccaatttttctcttattgtcgataactacgggagctattcctgcgttgttaaccggtgtaatggttgcctgtctgccggaaaagatcgggtcacagaaacgttatcgttgtctggctggtggcataggtggcgtcgttatcaccgagatctattgtgcagttattgtacatattaagggcatggcttcctcggagttgtttgaaaacattctttctggtgacagtctcgttgtccgcatcattcctgcattgctggcaggtgtggtgatgagcagaatcattacccgtctacccggattggatatttcatgtcctgaaacagactctttaagttaagcgggatactttatctttgggctactcaaaagcagacaggatgtttctatgactcaaaatatcaggccgttaccccaattcaaatatcatcccaagccactggaaacaggcgcatttgaacaggataaaaccgtagagtgcgattgctgtgaacaacagacgtcagtttattactcgggtcccttttattgcgttgatgaagttgaacatctctgtccgtggtgtattgcggacggttctgctgctgaaaagtttgcaggtagttttcaggatgatgccagcatagaaggtgttgaatttgagtatgatgaagaggacgaatttgccggtattaagaacacatatcctgatgaaatgctgaaagagttggttgaacgcacgccaggttatcatggatggcagcaggaattctggctcgcgcattgtggcgatttctgtgtttttatcggctatgtgggctggaatgatataaaagatcgcctcgatgaatttgccaaccttgaagaagattgtgagaatttcggtattagaaattctgatctagctaaatgcctgcaaaagggtggtcattgtcagggttatctcttccgctgtctccactgcggcaagctgagactgtggggtgatttttcgtagttatttaaataatgagaacaggccggagcgtaattcacacatccggccttatttcttaagcttaaccgagtgctaattctgcggcacggctttatcagcgattaccatcagcgaaggatgcagctgcaacacggaagctggaacatcttcggtaaccggaccttgcagaacatttttcagtgcctgcgctttacccgcgccgctgacaattatcagcaagtttttcgccgccatgatgcttttcggccccatcgtcacgtagctgtcaggcactaacgaaaagtcgccgcccaactcgccatgcgccacaatatcaaccatctctccctggatcgggaactccacggtttgctcatggaaatgggtcgtattcggcaaattgccacaaaaatgaccatctgcacctaatcccagcaccaccaaatccagtccgccttcacgcgccagtttctgatcatgctcgcggtagttatcaatagtgagcttctggatattctcttctttgatccccgcaggggtgaaaaacagattacgcagattggtaatcgttacgccttctccctctttgccgcgaaatggaatttcatcaaaattatagaaatagcagttatcgtaccagggcttacctttaaccagggtggtgaggtattcatacatgcctttgggcgtgctaccggcggtaattgccaggttaacacgacgcgtcttcgacatataaccaagcagatggtgtgccgcgacacggctcatttcctggtaatcttcggtaatgattaatttcatcttaatgccttattttatttaaataatttctgtacaaaggctgcataggctggtcgccagacatccatttcatggttcagacccggatattcctggtaatcaaagttaatttttttctgctcaagctcagttttcagcccggcgatatccttgccggttacgacatctttatcccccacaaccacagtaaaattacgtagttgctggttgatagctgccggatcgttcagtcgggccgcgacaccttcatccggtacggttgtcgtggtaacaccactgaatgtggccagccagccaaagctttccagatgattcattccggaaaccagcgcctggtacccgccttgtgaaagccctgccagcgcgcggccatcggcatctttacggacattaaaacgcttgctaatcagcgggataatatcgttcatcagttcgcgatctgccgctttagcattcagcggataaaagactttacgtctttcctgaggcacgaaatcttcgggaataatgcccttcgcatcggtttctgtatccgggatcaccaccagcatcggtttaattttcccttcagcaagcaggttatccatgatttgcgggatacgcccctgatcgatagcggaacgtccggtatcaccaaagccgtgatagaaatagagcactggcaaaggctcgcccatgccggtgtatcctggcggggtccagacatacatctgacgttcagattgcaatgcgttggagtggtaagttatggcgatcaaatcaccatgcgcaacagaacgcgtatccagataactgcctggcaccagaatcatactggagttaacctggcgctgaggattagtcattgcggtgcctgtatcaatgctgcgtacaccatcaacattgaaaaaatactcgtacaggttgcctttcaggataggtgtgcgccacgaccagactcctgcttcgtctttggtcatcgggtgaatattgtccggaaccggaacacccaccactacagagacattttttgccccaggggcaaagtagcgaaaggtcacgctgttatcggcattgacctgagtcacatactgtttcaccgggatagtgggtgccgggctggctggcatatccgctgctatggcccactgagcagaaataccgctggcaatagccagcgttaaagcagcaatttttatattcatcgtaatattcctttcattaagttccattaccaccagatttcagcctgggcaccgacagcaaactggtcgtctttattgtcttcaaaggtgaagccatccagttcgttttccagggctttgatatacgtggcgtagaaacgaatttccggacgcgaggtcaacatactggtattgactttaaaggtatggaagagcgtggttttataaccagactcattaaatttattactattcgcatctttgttttgctgggtgaaatagcccagttcaacacctgtctggttatattggtcccaaatataggccgggcgaacaaccgcacgaatagattcgaaatcagagtgggcgcctgtttcgtagctatatatatcgttaccgaaggagtaaacaatcgcgttagctacaatgaaatgatcgccaatataggcttcgccctgcgaagtcagacgtaccgctgttccgccggtgtgatcaccataataacgaccattaaaggtggtaaatggacttgcgccagcataacggccaaagttactggcgatagagttattcgcgaccaggaaggagaattcgttgaagccacctttatcaaatttctgcgttaaagatgtgccaaacatccaggtatctttccagtcataatacccgttattatcctgattatctttttccgatgcgctttcgtttgccgtgacataacgaccacttaccattaaggtggctttatcccataacgggatatctttatagcgtaaatcaatggtattggtattaatctgctgtttgttttgcaggctgcgatcgtaatcatcgacatcttcgcgaaccagcgcgatatcaattttacccggaccgactttccagttttccagacctacacccgctgcggcatcagtacgctgcgttttccagtcaagcatctggatttcaattttcggcgcaccgtgtttacccacccagaaatcagcctctggcgcaaagggcaggaaacctttggtggtaacgtacatatcggagaactgcatatagttctcgccaccggcgttatcgccaaaccagccggtagagtactgctgaccaacgttaccatccatcatcacaacggcatcaacccgtttgccgttttcgttgtagacacgttgttttaactgcaaatcaaaccagccggagtattcgttaccaaagcggcccagagaaccaatcgcccatgatttaggtgaaccatgagaggcggtcccccaaccagaacggtaatagccgttgtaactaaagccaatttcatctttcacaaatttactgaaatctttcagagtcatggaagaataaatcgagcctgtctcactggcatttttctcttcatttttgaccagtacagcatcaggttttgcggcactactggtcgggaacggattggcggcatacccttgatcattcgtacttacgctacgattcaccgtcgctggcgtatactttttcttctcttcatctttatactttttgagttcgctttgcgtttctcttaacgccttttctaataactcaaggcgttgttccaccgttaatgattcagccaatgattgtgcagaaaaggctaacggtgccattaataagatggcagaggtaataagatttcgtctaaacataatatccctttatggtgcaaagaaagaattaacgcatcgcatccagactgttctgaatgcgacgataattaaggtgctttaatggttattttttttaatgacagcccccgcgtcttgatcacctctgcataccatccgaagcttttcttgcgtgttcttgtgaggcttccttcgccattatcatcacgatccacataaataaagccgtagcgcttagacatttgtgaatgagatgcactgactaaatcaattggcccccaactggtgtaccccataatatccacaccatcggcaatcgcttcatttacctgtaccaggtgatcgtttaaataggcaattcgataatcgtcctgtatcgaaccatccgcttcaacgctgtcttttgcgcctaatccgttctcgacaataaataacggtttttgataacgatcccaaagcgtatttaacagaacccgtaatccaaccggatcaatttgccacccccactctgaacttttcagatgcggattggggatcatattcagtatgttgccctgcgcatttttattaatgctttcgtcgtgggaaacacaaccagtcatgtaataactaaaagagatgaaatcgacggtatgttttaaatcttctgcgtcactttcagtcatctcaatggtgatattgtggtcgcggaagaaacgctgcatatagccgggatactggccacgcgcctgaacatcaccaaagaacatccagcgccggttctcttccatggcctgcaacatatcctgtggctggcaggtgagggggtaaaccagcccaccgagaagcatattgccgattttcgcttcggggagcaggctatgacaggctttaactgcccgcgcactggcaaccagttgatggtggatagcctgataaacttccgcctcgccactctcttctgccagccccacgcccgtgaatggcgcgtgtaacgacatgttgatttcattaaacgtcagccataacgccactttatgttggtagcgagtaaagaccgtgcgggcgtaatgctcgaagtgatcgatgaccgctcgattagcccaaccgccgtagtttttcaccagcccatatggcatttcgtaatgggataacgttaccagcggcttgatccccgcctgcgccatttcatcaaacagccgatcgtaaaacgctaaccccgcttcattcggttcgacttcgtcgccctgagggaaaattcgcgcccaggcaatggaaatacgcagacaggtgaagcccatctcggcaaataacgcgatatcttccgggtaacggtgataaaaatcgatggcgacatctttgatattctctttccccaggatgcgcggttccatttttcccattacgccatgaggctgtaaatctgaggtcgagatccctttgccatcttcctgccaggcaccttccacctgattggcagctgttgcgccaccccaaagaaatgtttctggaaatgctttcataattaactccttttatcgttagcgaatgatggataacagcggttcacctgcgcttatctgcgccgtgccgtggggtaatacgtccgtaaaatcatcgctattactgattaataccggcgtcgtcagatcaaatccggcctcgcgaatagcagggatatcaaaagaaatcagccgatcgcctgtattgaccttgtcacccacgttgacgtgagcggaaaagaatttgccgtccagttttacggtgtcgataccgacatgaatcaggatctccacaccatcatctgactcaatgccaatggcgtgtaatgtggcgaacaacgaagcaattcgacccgcaaccggagaacgcacttcaccaaccgagggcagaatggcaatacctttacccaacaggccactggcaaacgtggtatcagcgacgtgaatgagcggcacaatctctcccgtcatcggtgaacagataccgccctgctcaggtggtgtaataacctctggtgttttctcttgcggggcaccctgcgctggctgacgtttagcggtgatgaaatgaagcatcaccgtaccgacaaatgcgcaaccgatggcaatgacaccgccaataacgctggcccagacggtgaaatcaattcccgttgacgggatggtttgcatgaaggtgaaaatacttggcaaaccaaaggagtagactttcgtttgcgcgtagccaataatggtggcccccaaagccccactgatacaggcgataacaaaggggtacttacgcggcaggttgacgccatataccgctggttcggtgataccaaacagactcgtcaacgccgctgatcccgccaccacttttttctgcgcatcgcgttcgcagaggaagacgccgagcgccgccccgacctgcgccataatggcgggcattaacagcgggatcatggtgtcgtagcccagcacggtgaagttattgatacacagcggcaccaggccccagtgcagtccgaacatgacgaagatttgccagaagccgcccattaccgcgcccgcaaatgcaggaaccgcctgataaagccagagataaccggcggcaatcagttcgcttatccaggttgatagcggccccaccagcagaaaggtgacgggtgtgataaccatcagacatagcaatggtgtgaagaaatttttgattgccgacggtaaccacgcattaagtcggcgttccagaatgctgcacaaccaggcagaaaaaataatgggaataaccgatgacgagtaattcaacaatgtgaccggaatacccaggaaatccagccccagcgcatccgctttttgcccgttctcgaaagcagtcagaattaatggatgcactaacgctccaccaatcaccatggcagtaaatggattaccgccgaagcgtttccccgcggtgtatcccaggattatcgggaagaaccaaaacaaggcatcactggcgctgaataaaattaaataagtaccactttgttcggtcgtccactgaaaagtgagcgccagagccagcatacctttcaagatcccggttgccgccatcaaaccgatcagaggcgtaaaaatacctgaaataacataaacaaagcggtttagcagattacctttatcatcattttccggtgcctgttgcgctttttcgtcaaggcctgccacactgttaaccgccaggaagacatcggccacatggttacctatgaccacctgaaactggccaccgctttccaccaccataataataccgggggtctttttcagtacctctgcttgcgctttgctttcatcctttaatttaaaacgtaatcgcgttgcgcaatgcatcagactcacaatgttatctgcgcccccgactcctgcgactatttttctggctaactccgtcataacttgccctctaccgctttgcggcaaaactccaaaaaaaaacctgaaaaaaacggcctgacgtgaatcaagcaatttttttcaggttttgcccgcttagtgcggtaacaatcctttactcagtaataatatttcagtgttctttgcgcacgcgctctatatttatggctaaaaacataatctctgcgggtgaaattttacgttgatactgcaaaccaataaaaatggcgatccgttccgcacattgccatgcttgcgggtaattttgttttactgcttgttgtaatgattcatcactatcgttaattgaagcatgttcaagaatacgccaggataaaaacttcagatgtgtaaccagtcgctgataactcaagctttcttcctggtaattaaggctgaactgaaattttattaattgcagcatttcgcgcattaactgcgtgacacctgcaacatcctccatatttccgctcatttgggcactgaccagatgcatggcaataaagcccacttcatctttcggtaactgcacgcccaaccgtttatcaataatggttaacgcttcttcccctagctggaactctttcgggtaaagccgctggatatcccacagcaacgggttgggcagcaacacgttttgctgaaagcgtttaatcgcaaactggcaatggtcagttagcgagatataaatactgtcctgtaattttcccaagcgctcctgcgctaaagagataatacgatcacaggttgccatcacctcaagaggaatatgacttaagagttcgcttaatcgcccgttcagttcatgactgctcaaggcatactctttttctattccacttgagttaattctttcgccagcgcgtttttgaaagccaattccgcgccccatgacgactttttcccgctgttgatcatcaataaccaccacaacattattgttgagaattttggtgatttgcatgttcatagcaaggaccttttttataaacaaaaaaacccgacttcaccagtattctctggttatgtcaggttttgcctgcgaatgcagtaacaatccagtcatttattaatggtttttataacgaacatccaggttcggaaattaatttaattgcgtgcagagaaaatagcaatgcgctattgataaaaatatgaccatgctcgcagttattaactttgtgtaattttaggaatttataaagttatatataacaaatcccaataattaagttattgggatttgtctggtgaattatttgtcgctatctttccccgccagcagtttatccagctcatcgccaccgacgtgacggaaatcctgccccttcacgtagtagaagataaactcacaaatattctggcagcggtcgccaatacgttcgatagaacgcgcgcagaacagcgcagtaagtacgctcggaatggtacgcgaatcttccatcatgtaggtcatcagttgacgaacaataccttcgtattcctgatcgacttttttatcttcacgataaatacgtaccgcttcgtcaatgtccatccgcgcgaacgcgtccagcacgtcgtgcagcatctggatggtatgacggcccagcgactccagacttaccagcaacggctgatgctgctgggagaatttctccagcgcagtacggcagattttgtccgccacgtcgccaatacgctccagctcggcaatggttttactgatcaccataaccagtcgcaggtcgctcgccgtcggctgacgtttggcgataatgcgcacgcaggcttcatcgatcgccacttccatcatgttgacgttcttgtcgccttcgatgacgcgcttcgccagatcgctgtcctggttatgcatcgcggtgattgcatcagaaagctgctgctccaccatgccgcccatggtcatcacctgcgtgcggatactttccagttcggcgttgaactggccggaaatatgtttattaagattgagactgtccataacgcactcctgaatcaaccgtaacgaccggtgatgtagtcttctgtttgtttcttcgctggcttggtgaacagatcgtccgtgttgctgaactcaatcaattcgcccaggtacataaacgccgtgtggtcggaacaacgcgcagcctgctgcatgttgtgggtgacgatcaccacggtgtaatcctgcttcagttcggtgatcagctcttcaatacgcccggtagagatagggtcgagcgccgaacacggttcgtcgagcagcagcacttccgggcgaatggcgataccacgcgcaatacacagacgctgttgctgaccaccagagagagagtaaccgctctggtgcaatttatctttggtttcgttccacaatgcggctttggtcaatgcccactgcacgcgctcgtccatgtcggcacgggagagcttctcaaacagacgaacgccaaaagcgatgttgtcgtagatggacatcggaaacggcgtcggtttctggaacaccatgcccactttcgcacgcagcagtgcgatatcctgagagttggtcaggatgttgtcgccatcaagcagaatttcaccttccgcacgctgctccgggtacagttcaaacattttgttgaaggtacgcagcagcgtcgatttaccgcagccggacggcccgataaacgccgttacctggtttttagcgatatccaggttgatgtttttcagggcatggaatttgccgtagtagaagttcaaattacgaacctgaattttactcggggcagtttcaaccatactcattgcaatcttttcctcatcgtgcctgatgcacttcgctaatcaggcttaccgtaggccggatcaggcgttcacgccgcatccggcaaagtgttaaccgtgtacagagtcaaaaaggcgctcggtcggtcccctcgcccctctggggagagggttagggtgaggggaaaaccgtgtcagcaatatcaaccgtgtttattcttcgcaaaaacaacgcgcgccagaatgttcagcagcagtacgcacagggtaatgatcaataccccggcccaggccaattgctgccattccgcaaacgggctcatcgcaaacttaaagatcgtcaccggcaggttggcgatcggctgcatcatgtccgtgctccagaactggttggagagcgcggtaaacagcagcggcgcggtttcaccagcaatacgggcaatcgccagcaggataccggtcataatcccggacaccgacgctttcagcgtaatcgcagagatcatcttccacttcggtgtacccagcgcataagccgcttcacgcaggctgtacggcaccagtttcagcatgttctcggtggtgcggataacaatcggcacctgcaacaacgccagggcaatcacgcccgcccagccggagaagtgctccatctgcgccaccacaatggtgtaaacaaacagaccaaccacaatcgacggcgcagagagcagaatgtcgttaatgaagcgaatcacttctgccagccaggatttacgaccatattccgccagataaatccccgccataatgcccagcggcgtaccgaataccgtggcccacaaaattaacagcccgctacccgccagagcgttcgccagaccaccaccttccgtattgggcggcggcgtcatttcagtgaacagcgccagcgacataccgtcgataccgcgagtgatggtggacattaaaatccagatcagccagaacaggccgaaggccatcgtcgccatcgagagcgtcagcgcaatacggtttttgaggcggcgacgcgcctgcattttgcggcgagattcagccagcgccgcagtggtttgcatttcaaccatagccattagcgtgccccctcattcttagccaggcgcataatcataaacttcgatgcggcgaggacgatgaaggtaatcacaaacaggatcaggcccagttccatcagtgcggcaacgtgcagaccggattccgcttccgcaaattcgttcgccagcgcagaggtgatactgttgcccggcatatacagcgaggcgctgtcgagctggtaggtgttaccgatgataaaggtcaccgccatggtttcaccgagcgcgcggcccagccccagcatgatgccgccgataacaccatttttggtgaacggaagaacgatacgccagataacttcccaggtggtgcagccaataccgtaggccgactctttcatcatcaccggggtttgttcgaacacatcacgcattaccgccgcaatgtacggaataatcatgatggcgaggatcacgcctgccgcgaggataccgataccaaatgcggggccagagaacagcgcgccaacaatcgggatattcgacatgatattgccgaccggctcctgaaagtaaacggcgaacagcggcgcaaagataaacaggccccacatgccgtaaacgatacttggaatggctgccagcagctcaatggcgatacccagcgggcgtttcagccagccaggcgcaagctcagtcaggaacagggcgataccgaaactcaccgggacggcgatcagcagcgcgataaacgaagtcaccaacgtaccgtagatcggcaccagcgccccgtagatatcgttcggtgcatcccactctttggtccataggaaagccagaccaaatttctgaatgctcggccaggaggagatgatcagagagacaataatgccacccaacatcaatagcacaatcagcgccgccagttttaccagcacgctgaaaattatgtcgccctttttacccggtgggttaaaagcaggcttggttgcagccataagttactcttcagttaaacgcgtttacaaagtcattttgtaatgccggatgcggcgtaaaacaccgtacccggcctggagttttattagtacagcggcttaccgctactgtctttaatattggtcttccacgcagcgcgaacctgttcaactacactatccggcaggctggcgtaatccaggtcgttcgcctgtttagccccggttttgtacgcccagtcgaagaatttcagcacttctgtgccttgttctggtttcttctgatctttgtggatcagaatgaacgtggtagaggtaataggccatgcatcttcgcctttctggttggtcagatcctgagcgaaggttttgctccagtctgcaccttttgctgcattagcgaagttttcttcggtcggactaaccggtttaccatcagcggagatcagtttggtgtacgccaggttgttctgcttcgcgtaagcatattcaacataaccaattgcacccggcagacgctgaacgaacgcggcgataccgtcgttacctttaccgcccagaccgatcggccattttacggtagagccagtaccaacgttgtttttccactcttcgttcactttcgccaggtagctggtgaagacgaaggaagtcccggagccatctgcgcggcgtactacagcaatgttttgtgaaggcagtttcagacccggattcagtttggcgatggcttcatcatcccacttcttgattttgcccaggtagatgtcgccgagggttttaccatccagcaccagttcgccagacttcagccctggaatgttaaccgccagcaccacgccgccaatcacggtcgggaactggaacagaccttcctgagccagtttttcgtcagacagcggcgcgtcagaggcaccaaaatcaacggtattagcgataatctgttttacgccaccggaagaaccgataccctggtagttaactttattaccggtttctttctggtaagtgtcagcccatttggcatacaccggcgcagggaaggttgcacctgcacctgtcaggcttgcttctgcaaacacagagaaagcactcatcgataaggtcgcggcgacaacagttgcgacggtggtacgcataactttcataatgtctcctgggaggattcataaagcattgtttgttggctacgagaagcaaaataggacaaacaggtgacagttatatgtaaggaatatgacagttttatgacagagagataaagtcttcagtctgatttaaataagcgttgatattcagtcaattacaaacattaataacgaagagatgacagaaaaattttcattctgtgacagagaaaaagtagccgaagatgacggtttgtcacatggagttggcaggatgtttgattaaaaacataacaggaagaaaaatgccccgcttacgcagggcatccatttattactcaaccgtaaccgattttgccaggttacgcggctggtcaacgtcggtgcctttgatcagcgcgacatggtaagccagcagctgcagcggaacggtgtagaagatcggtgcaatcacctcttccacatgcggcatctcgatgatgtgcatgttatcgctacttacaaaacccgcatcctgatcggcgaagacatacaactgaccgccacgcgcgcgaacttcttcaatgttggatttcagtttttccagcaattcgttgttcggtgcaacaacaataaccggcatatcggcatcaattagcgccagcggaccgtgtttcagttcgccagcagcgtaggcttcagcgtgaatgtaagagatctctttcaacttcaatgcgccttccagcgcgattgggtactgatcgccacggcccaggaacagcgcgtgatgtttgtcagagaaatcttctgccagcgcttcaatgcgtttgtcctgagacagcatctgctcaatacggctcggcagcgcctgcagaccatgcacgatgtcatgttcaatggaggcatccagacctttcaggcgagacagcttcgccaccagcatcaacagcacagttaactgagtggtgaatgctttagtggatgccacgccgatttctgtacccgcgttggtcattagcgccagatcggattcgcgcaccagagaagaacccggaacgttacagattgccagtgaaccaaggtaacccagctctttcgacagacgcaggccagccagggtatccgcggtttcgccagactgtgacaaggtgatcatcaggctgttacgacgcacggcagatttgcgatagcggaattcagaggcgatttcgacgtcgcacggaatacctgctagcgattcaaaccagtagcgggaaaccataccggagttataagaagtaccacaggcgaggatctgaatatgctcaaccttcgacagcagttcgtcggcgttcggtcccagctcgcttaaatcaacctgaccgtggctgatgcgtccggtaagggtgtttttgatcgcgttcggctgttcgtagatctctttctgcatgtagtgacggtaaatgcctttatcgcccgcgtcatattgcagattggattcgatatcctgacgttttacttccgcgccagttttatcgaagatgtttaccgaacggcgagtgatttccgcaatatcgccctcttcaaggaagataaagcgacgggtcaccggcaacagcgccagctggtcagaagcgataaagttttcgcccatccccaggccaatcaccagcggactaccagaacgtgccgccagcagggtatccgggtgacgggagtccatgatcactgtaccgtacgcaccacgcagctgcgggatagcacgcagaacggcctcacgcagagtcccgccttgtttcagctcccagttcaccagatgggcaatcacttcggtgtcggtttcagaaacgaaggtatagccacgcgcttttagctcttcacgcagcggttcatggttttcgatgatgccgttatgcaccaccacaatgtgttcagaaacatgcggatgcgcattcacttctgaaggttcaccgtgggtcgcccagcgagtgtgagcaataccagtgccgccatgcagaggatgttcttccgctgcctgtgccagcatctggactttaccgaggcgacgcaggcgggtcatatgaccttctgcatcaacaacggccagaccggcagagtcatatccgcggtattccagacgacgtaaaccttcaagaaggatttctgctacatcacgttgcgcgatcgcgccaacaattccacacatagtttttgattccgatttatatcgttgtcggtcaacctgtatgcccgttttttcgggcgccccgagccttgtagagagtggggttatttttatagttactgcttgtgggagggagattatgttatctcctcatcccatgtgaccgggttagccggccagaatcactttttctttaccggacgacgccagccttctttctgagtctgcggcacacggctgatagctaatgcattttcgccgacattacgcgtcacagttgtacccgcagcaatggtcgcgcctttgcctactgttaccggggccaccagctgagtgtcggaaccaacaaacacatcgtcgccgataatggtcttaaatttattcgcaccatcgtagttgcaggtaatggttcccgcgccgatgttaacgttatcgccaatttccgcatcgcccaggtaagtcagatgaccagctttcgagcctttacccagacgcgcttttttcatctcaacgaagttaccgacgtgagcaccttccagcaactcagcaccaggacgcaaacgggcaaacgggccaatggtacaggccgctgccagattcgcatcttccacaacggtatacggactgatttcgcaatcatcgccaatcacgctgtttttaatcacgcaaccggtgccaattttcacgcgatgaccgagagtcacgttgccctcgatgataacgttagtatcaatttcaacatcgcgcccgtgagttagcgtaccacgcagatcaaaacgcgctggatcgcgcagcataacgcctgctaacagcagtttttcagcctgttcggactgataaacacgctccagacgggagagttgcaggcggttattcacgccttctacttcgcttaaacgttgcggatgaacggcgacgatttcacgcccttcctgatacgccagcgcaataatgtcggtgatgtagtattcgccctgagcattattgttggtcagcttcgccagccagcgtttcatatctgcgccgttggcaatcagaatgccggtgttgatctcctgaatctgacgctgctcgtcggtggcatctttgtgctcaacaatgccggtaactttgccgttttcacgggtgatacgtccataaccggtcggatcatccagtttcaccgtcagcagaccaatgccaccctgcggtttagcatcacgcagacgctggagtgtttcgacagagatcagcggcacgtcgccgtagagcattaaaatgtcttcatcatcggcaaagaaaggtgcggcctgctgcattgcatgacccgtacccagctgctctgcctgaagcacccagttaaggttgtcgtctttcagcgcctgttttagcagatcgccgccgtgaccgtacaccaggtgaacgtgcgctgcgcctaattcattcgcagcatcaatgacatgctgaaccatcgctttcccggcaagggtatgcagcactttcggaagatcggaatacatgcgcgtgcctttgcctgcggcaaggatcactacgctcatagcattattcaacatacgcgtcctgactgtaatttgagaacgaatttaaaccgcttcaccttgaaaaaactacatttttttcatcgtgaaatggacagaggataaattgttcaataacggattatccccgctgacgaaagcgccattttcgaccatcgtcacgccttttgtctgcagaaaattaaggcagtaccttaatttaagcgtcaggtggatgtttttgctcttatttcgatcaatgaataaacaggaaaacaggggggttttatatcagcaggatctatgtgaacgctattcaggacgggtcacacgcgcaaaaaaaagccagcctgtttccagactggcttttgtgcttttcaagccggtgttacatcgcttttttggtcaactcgataacgcgcagctgcgcgatcgctttggccagttccgcagacgcctgagcgtaatctacgtcgccgtgagagctgctaatgtgctcttcagccttacgtttcgcttccatggctcgcgcttcgtcgagatcctggccgcgaattgcggtgtcggccagaacggtcacgttgccaggctgcacttcaagaatgccgccagacagatagataaactcttcgtgaccgtgctgtttcacgatgcgaatcataccaggcttaatggcggtgagcagcggtgcgtggccagggtagatccccagttcaccttcgctacccgttacctggattttctcgaccagaccagagaacatttgttgctctgcgctgacgacgtccaggtggtaagtcattgccatatcaccctccgattaaggcgttaaagttttttggctttttccacagcttcttcgatggaaccgaccatgtagaacgcctgctccggcaggtgatcgtattcgccttccatgatgcctttaaagccacggatggtgtctttcagggagacgtatttacccggagaaccggtgaatacttctgccacgaagaacggctgggacaggaagcgctggatcttacgagcacgcgctaccaccagtttgtcttcttcagacagttcatccatacccaggatggcgatgatgtctttcagttcctgataacgttgcaggatggactgaacgccacgcgcggtgtcgtagtgttcctgaccaaccaccagcgggtccagctgacggctggtggagtccagcgggtcaacggccgggtagatacccagagacgcgatctgacggctcagtaccacggttgcgtcaaggtgcgcaaaggtggttgccggagacgggtcagtcaagtcatccgcaggtacgtatactgcctgtacggaggtgatagaaccagttttggtggaggtgatacgttcctgcagaacgcccatctcttccgccagggtcggctgataacctaccgctgaaggcatacggcccagcagtgcggatacttccgtaccggccagggtgtaacgatagatgttgtcaacgaacagcagaacgtcacgaccttcgtcacggaatttctcagccatggtcagaccggtcagagcaacgcgcagacggtttcccggcggctcgttcatctggccatacaccagggatactttgtcgataacgttggagtcggtcatttcgtggtagaagtcgttaccctcacgagtacgttcacctacgcccgcaaacacagagtaaccggagtgctcgatcgcgatgttacgaatgagctccatcatgtttacggttttacctacacccgcaccaccgaacagaccaactttaccgcccttagcgaacggacacatcaggtcgataactttgataccggtttccagcagttcctgagagtttgacagctcttcgtaggaaggtgctgcgcggtgaatcgcccaacgctcttcttcaccgatctcgcctttcatgtcgaccggttcacccagtacgttcatgatacggcccagagtcgctttacctaccgggacttcaatcgggtgttcgaggtcttttacatccagaccgcgacgcagaccgtcggaggaacccattgcgatggtacgtacgataccgccgccgagctgctgctgaacttccagcaccagacgctcattaccattttgcacctcaagagcatcgtacacgcgcggtacggcatcctgagggaattcgacgtcaactacggcgccgattacctggacaatctttccagtagccatcttaaatcctctacgaaataacctgtttaaaccgcggcggcccccgagacgatctcggtgagttcctgagtaatgctggcctgacgagctttgttgtataccaactgcagctctttaatcaggctgccgccattgtcggtcgcggctttcatcgccaccatacgggcggcctgctcgctggccaggttttcaaccacgccctgataaacctgagattcgacataacgacgcagcagggtatccagcaacgccttcggatcgggttcgtacaggtaatcccaggatttatgtttcagatcatcatcatctgatgccggtaacggcagcagctggctgatggtcggaacctgagacatggtgttaataaatttgttgctgacaatgtaaagcttgtccagacggccttcgtcgtaggcctgcaacatcacttttaccggaccgatcagttcggacagggaagggttatcccccatgccggtgacctgggcaacaacattgccgcccacggagttgaagaacgacacgcctttcgagccgatcattgcgaggtcgcattgaacgcctttgtcggtccaggtcttcatttccgccagcagttttttgaacaggttaatgttcaaaccaccgcacaaaccacggtcggtcgacaccaccaggtagcccacgcgtttaacgtcgcggtcttccaggtaagggtgcttatattccagattaccgtgtgcaaggtgaccaatcactttgcgcatggtttctgcataaggacggctggccgccatgcgatcctgcgatttacgcattttggaagcggcgaccatctccatcgctttagtgatcttttgcgtgttctggacgcttgcgatcttactacgtatctcttttgcgccggccatgagcttctcctcaatgccttgcggcctgccctaaggcaagccgccagacgttaccaggattgggttgctttgaaggaatcgaggatgcctttcagcttgccttcgatttcgtcgttgtagccaccggtctggttgatctcttgcatcaacggagcgtgatcacggtcgacgtaagccagcagagcggcttcgaagctgccaattttcgacagttcaacatccgccaggtaaccacgttctgctgcgaacagaaccagagactgctgcgcaacggacatcggcgcatactgtttctgtttcagcagttcggtcactttctgaccgtggtcaagctgcttacgtgttgcatcgtcaaggtcggatgcaaactgagagaacgctgccagttcacgatactgtgccagagcggtacggataccaccggacagttttttcatgatcttggtctgtgctgcaccaccaacacgggatacggaaatacccgggttaaccgcaggacgaataccggcgttgaacaggttggtttccaggaagatctgaccatcggtaatggagattacgttggtcggaacgaacgcagaaacgtcacccgcctgagtttcgataatcggcagtgcggtcagagaaccggttttccctttcacttcacctttggtgaaggcttcaacgtattcggcgttaacacgtgcagcacgctccagcagacgagagtggaggtagaaaacgtcgcccgggaatgcttcacgtcctggcggacgacggagcagcagggagatctgacggtaagcaacagcctgtttagacaggtcatcgtaaatgatcagcgcatcttcaccgcggtcacggaagtattcgcccattgcgcaaccggcatacggtgccaggtattgcagtgcagcggattcagacgcggttgctaccacaacgatggtgttagccagtgcgccgtgctcttccagtttacgtaccacgttagaaatggtggacgctttctggccgatagcgacatagatacatttgataccggaatcgcgctggttgatgatggcatcgatagccagtgcggttttacctgtctgacggtcaccgatgatcaattcacgctgaccacgaccgattgggatcatggagtcaacggctttataaccggtctgtaccggctgatctacggactgacgttcgataacgcccggagcgattgcttctacagcagagaagccgtcgtgatccagcggacctttaccgtcgattggtgcacccagagtgttaaccacacggcccagcaggccacggccaaccggaacttccaggatacggccagtacacttaactttcatgccttcggcaaggtcagcgtacggacccataacaaccgcacctacagagtcgcgctcgaggttcagtgcgatagcgtaacggttacccggcagggagatcatttcaccctgcatacaatcggccaggccgtgaatgcggataacaccgtcacttacagaaacaatagtaccttcgttgtgagcttcactcacaacattgaactgagcaatgcgctgcttgatcagttcgctgatttcggtggaattcagttgcatgctccagtccccttaagactgcaagacgtctgcaaggcgctcaagacgaccgcgtacgctgccatcaatgaccatatcacccgctcggatgataacgcctgccattacagacttatcgattttgcaattcagcttaactttgcgtgacagacgtttttccatcgcagcagaaattttcgcgagctgttgttcactcagtgcggcagcggaaatgacgtctacctcagcggtagcctcactcacggcacgcaggtgaataaactgctccagaacatccgggagcgcgttaagacgaccattttcagccataacccgaatcaggttctgaccgttttcgtccagttgctcaccacaaactgcgataaacgactcggcgagcgtttctggcgcaagcgcgccagagagaagctctgccatttgttcgtttttggttacctcggcggcaaacgccagcatgtcctgccagcgttctacactttggtgttcgacggcaaagtcaaaagctgctttggcgtaggggcgagctaccgtaataaattcagacatcagcccctccctccttacagttcagcgacaagtttatccacgatgtcgctgttagcagcttcatccacggaacgttcgatgatcttctcggcgccagcaacagccaggatagcaacttgcttacgcagctcttcacgggcacgtttacgctcggcttcaatttccgcctgcgcctgggccacgattttagtacgttcctgttctgcctcagctttcgcttcgtccagaatctgcgagcggcgtttgttcgcctgctcgatgattacctgggcttccgctttcgcttttttcagctggtcggtcgcgctggcctttgcaaggtcaaggtccttatgtgctcgttctgcggaagcaaggccgtcagcaatttctttttgacgtttttcgatggctgccattaatggcggccatacgtacttcatgcagaacagaacgaacaggacaaacgcgatggcctggccgaggattgttgcgttaagattcacagcacaatgcctctatttagttaacgttctgatattgctctttaaataaaagcaacgcttactacgcgacagcgaacatcacgtacagacccagacctacagcgatcatcgggatagcatccaccagacccataacgataaagaactgagtacgcagcagaggaatcagatcaggttgacgcgctgcgccttccaggaatttacccccgaggatgccgataccgatcgcagcaccgattgccgccagacccatcatcacagcggcagccatgtacagcagatccatattcaggttttccatgacagtctccagtttgtttcagttaaaacgtagtagtgttggtaaattaatgttcttcagacgccatcgacagatagacgatcgtcagaaccatgaagatgaaggcttgcagcgtaatgatcaggatgtggaaaatggcccacggcacattcaggatccactgtgaccaccacggcaacagaccagcaatcagaatgaaaatcagctcaccggcatacatgttaccgaacagtcgcaaaccgagtgaaactggtttggacagcaggcttaccccttcaaggattaagttgacaggaatgaacgcccagtgattgaacggctgcagcgtcaactctttcgtgaagccgccgatgcctttcattttgatgctgtagaacagaatcaggataaatacgcccagtgccatagacagcgttacgttcacgtccgcagacggaaccacacgcagtgcaggcagacccagtacatgttcagcaatgtacggcagcaggtcgataggcagtaaatccatcaggttcatcaggaatacccagacgaagatcgtcagggccagcggagcaatcagcttgcttttgccatggtacatgtctttcacgctaccattaacaaagccgatcaccagctcaatcgcggtctgaaacttacctggcacaccgctggtcgcctttttggctacgctacggaataaaaccaggaacaacagacccagcaccaccgagaagaacatggagtcaatattgattgtccagaaggtggctggggggttttgtggatccaccagcgagaatgtacgcaggtccagctgaaggttattcaggtggtgtcctatgtaatcctgcggcgtcatattttctgaagccatgatgccttttaccctttgttgttaattacagccggtgccagtatctgaaccaccagcaccaaaacccacgtaacgatcagcggcaagaataccgcctttaaaaccgccaacgccaccaccagtaacaccaacatcgccagaactttgaaagcttcgccaaatgcgaatgtccaggccacccggcctttcgctggtgtatgcgcctggtgacgccaggcaaatatcataaacaaaacgttaggcagaaagactgccaggcccccgcttattgcagagacgccccagaaggggtctttgaggctgaacagcaatccacttgctatcaccaccagtaactgaacgagcagaagcttccgagcaacgtttcgactcacgagcgacacagacatcacgtttttcactcctgctcccttcgaggtatgccgcgtgtcgtataaaactttctttaaggcttagagtcaagcatcaaaaagcggtcaaattatacggtgcgcccccgtgatttcaaacaataagtagccaaaaggtgaataaatgtttaaatatttttccagtgcatacaattgcgacttttctgctaaccctgttcgatcatgaaaaactgtaaataacgcgtaaacactggtgataaagcgtgcttcagatcacatattgcgcatgttcgcgcacagcatatttatttacttggcaaatgatgcctttgcaagtttatgatatttcagtctaaaaacagatactgttttaataaatgacatttacacaacaaaaaccacccattgacatttttaataatgttttaacagccaatgatggttcttagcgccgatttttagcagactgatattttcactaatgacttattttctgcttaccaaaaaaagccacgttatcttgttgatgcaaaagagtgaacgtggcgttaaatgtaaccagttatatcagtagaaaacctggttgttgttaacagtctaaccggtcaattttttatgatttttttgataaaaattaaattttatttgctttaatcaccaccagatgacgttcgccatccagggctggaacctgaagtttaaccactgattcgacctgatattcttcgggcaacaaagcgatttcatcttccggcatttgccctttcagcgcgtagaaacggccttgctcaccaggaagatggtggcaccagctcaccatatcgttcagagaggcaaaagcgcggctaattacgccatcaaatggcggctctgaaggaaactcttctaccctgctctgtactggttcaatattctccagtttaagctcatgttgcacctgacgaaggaaacgcacgcgtttaccaaggctatccaacagagtgaaatgggcttcaggacgcacgatagagagtggaatgcctggcagtcctggtccggtgccgacatcgataaaccgttcaccttgcagatacggtgccaccacaatgctatcgagaatatggcgtaccagcatctcattaggatcgcggaccgaagtcaggttgtacgctttgttccatttatgcagcatattcacgtaggcaataagctggtttttctggtgatcggtaagcgaaatacctgcgtctttcagcagtaaggagagtttgttgagcacggtgattacctgttcttgatgcgttgcctggtaagcgggtgcttaccaggcatttttaatgcgttatgcgctacgacgcagcataccctgttttttcagccacaccagcagaatggagatggccgcaggcgtgacgccagaaatacgcgaagcttggccgatagaggctggtttgtgatcgttaagtttggcgatcacttcgttagaaagaccggatacctggcggtaatccagtgtcgcgggtagcagggtgttctcgttacgcagctgcttttcgatctcatcttgctggcgcgcgatataaccttcgtatttaacctgaatctcaacctgttccgccgcctgttcgtctgtcaacgcaggggcaaacggcgtcagcgtggttaatttttcataagtcatttccggacgacgcagcagatcttcaccactggcttcacgggaaagcggcgcagtcaggtgagcattcacttcggctgcagcttccgccgacggggttacccaggtcgatttcagacgctgacgctcacgctcgatattctcaagtttctcgttaaagcgcgcccaacgttcgtcatccaccaggcccagttcacgaccgatttcagtcaaacgcagatccgcattatcttcgcgtagcatcagacgatattctgcgcgcgaagtaaacatacgatacggttctttggttcctaaagtgcacaggtcatcaactagtacgccgagatacgcctgagaacgtgccggagcccaaccttctttgtcagcagacagacgggcagcgttaagaccggccagcaaaccttgcgcagcggcttcttcgtaaccggtagtgccgttaatctgaccagcaaagaacagcccctggataaacttgctctccagcgtcggtttcaggtcgcgaggatcgaagaagtcatactcaatggcataacccggacgcacgatcttcgcgttttccatcccctgcatagagcggacgatttgcatctgcacatcgaacggcaggctggtggagataccgttcggataaatttcattagaggtcagtccttccggttcaaggaagatctgatgctgatttctgtcggcgaagcgcatgactttgtcttcgatcgacgggcagtagcgtgggccgacaccttcgatcacccctgcgtacattgggctacgatcgaggttactgcggatcacatcatgggttttctcgttggtatgagtgatataacacggcacctgctggggatgctgggacgcattgcccataaacgagaataccggcattgggttatcgccatgctgttgcgccagtacgctaaagtcgatggttcgagcatcaatacgcggtggtgtcccggttttcagacgaccaacgcgcagcggcagttcacgcaaacggcgagaaagcggaatggacggcggatcaccagcacggccaccgctgtaattatccagaccgatatgaattttaccgtcgaggaacgtcccaacggtgagcacgacggctttggcacggaacttcagtcccatttgggtaacagcaccgaccacgcgatcgttttcgacaataagatcttcaaccgcctgctggaagatcatcaggttcggttggttctccagcgccgtacgtaccgcctgacggtagagcacacgatccgcctgagctcgggtagcgcgaaccgccggtcctttgcttgcgtttagtatcctaaactggatacccgcctgatcgatcgctttcgccatcagaccgccgagtgcatccacttcttttaccagatgtcccttcccaataccgccgatcgccgggttgcagctcatctgccccagagtgtcgatattgtgtgtcaaaagcagagtctgttgacccatacgcgccgcggccatcgcggcctcggtgcctgcatgacccccgccaatgatgatgacgtcaaaaggatccggataaaacatggtgattgcctcgcataacgcggtatgaaaatggattgaagcccgggccgtggattctactcaactttgtcggcttgagaaagacctgggatcctgggtattaaaaagaagatctatttatttagagatctgttctattgtgatctcttattaggatcgcactgccctgtggataacaaggatccggcttttaagatcaacaacctggaaaggatcattaactgtgaatgatcggtgatcctggaccgtataagctgggatcagaatgaggggttatacacaactcaaaaactgaacaacagttgttctttggataactaccggttgatccaagcttcctgacagagttatccacagtagatcgcacgatctgtatacttatttgagtaaattaacccacgatcccagccattcttctgccggatcttccggaatgtcgtgatcaagaatgttgatcttcagtgtttcgcctgtctgttttgcaccggaatttttgagttctgcctcgagtttatcgatagccccacaaaaggtgtcatattcacgactgccaataccgattgcgccaaagcggactgcagaaagatcgggcttctgttcctgcaatgcttcatagaaaggagaaaggttgtccggaatatctccggcaccgtgggtggagctgataaccagccagatccctgaggcaggtaaatcttctaacagcggaccgtgcagcgtttcggtggtaaaacccgcctcttccagcttttcagccaggtgttctgctacatattcggcaccgccgagggtgctgccgctgataagagtgatatctgccataaaccgccacctttattaagagtggcgtattgtacgctgtgaacgcgttgggatctacctgtggaaaagtatgggattaaaaaagccgatcagggcttgatggtacgcatgatcgggttttgcaggacgatcaatgtctcggtggactgaatttcatcaattgtttggatcttgttgataagtacatgctggagagcgtcgatcgaacggcacatcacttttataaagatgctgtagtggccggttgtgtaataggcttcagtgacttcatcaaggctttccagctttgccagcgcggaagggtagtctttggcgctctttaatataatgccgataaagcagcctacgtcataaccgagctgcttcgggctgacatcaatacgcgccccggtaatgatccccgcctgcttcattttctctactcgaacgtgaatcgtccccggactgacgccaaattgtttcgccagttcggcgtaagcggtgcgcgcattgcccattaatgcttccaggatgccacggtccagattgtcgatcagataattttccataggattttcttatgcggattgatgattcattctattttagccttcttttttaatgaatcaaaagtgagttaggctttttattgaatgattattgcatgtgtgtcggtttttgttgcttaatcataagcaacaggacgcaggagtataaaaaatgaaaaccgcttacattgccaaacaacgtcaaattagcttcgtgaaatctcacttttctcgtcaactggaagaacgtctggggctgatcgaagtccaggcgccgattcttagccgtgtgggggatggcacgcaggataacttgtcgggctgtgaaaaagcggtgcaggtaaaagtgaaagctctgcctgatgcccagttcgaagtggttcattcactggcgaagtggaaacgtcagaccttagggcaacacgacttcagcgcgggcgaagggctgtacacgcacatgaaagcccttcgccccgatgaagaccgtctttctccgttgcactcggtctatgttgaccagtgggactgggaacgcgtaatgggcgacggtgagcgtcaattctcgactctgaaaagcacggtagaggcgatctgggcgggaattaaagcaaccgaagctgcggttagcgaagagtttggcctggcaccgttcctgccggatcagatccacttcgtacacagccaggagttactgtctcgttatccggatcttgatgccaaagggcgtgagcgggcgatagcgaaagatcttggcgcggtattccttgtcgggattggcggcaagctgagcgatggtcatcgccacgacgtgcgcgcaccggattatgatgactggagcaccccgtcagagctgggccatgcgggtctgaacggcgatattctggtgtggaacccggtactggaagatgcgtttgagctttcctccatggggatccgtgtagatgccgacacgctgaagcatcaactggcgctgaccggtgacgaagatcgcctggagctggagtggcatcaggcgctgctgcgcggtgaaatgccgcagaccatcggcggcggtatcggccagtctcgtttgactatgctgctgctgcaactgccgcatatcggccaggttcagtgtggagtatggccagctgctgttcgcgagagcgtcccttctctgctgtaataatttatcgccgccagcgtctgagcaggcggcttcgcatcccggtatcaaagcgccagatatgatcgaaaatgcgcatgatgccgggtttgccgtgtgccgacatcgccacggcatgaaagcgatgctgatgtacccgctgcagctctttcactttactcgtcacgtcgtcaggcaaccgctgagcgataaaatcagaaatcaccaccgcatcggcatcaaaccattccctgctttgcaagcgttccataatggcgcgaaaacaactggcaagatcggtgccgccacgaaactgctggcttaaaaaacggattgcttgttcgatgccttgtgggcctgaaagctcataacggacgatctcggtggaaaatagcataatatagcagcgccggttttctgcgagagcaatgcgcatcaaggccaggcagaacgctttcgcacactgttcattaaagccgcccattgagccggaagtatccacacagacaataaacggcccgcgcggctgttcatcgtaatctttatgtaccaccggacgttcgatcactttttcacgccacgactcaccgtgcaggcgataggtgagcaactgtttttccaccagccgacggtaaaactcatactccagttccgttatccctagtgtcgccagttctggcggcaggagacgtaaaatatcatcgctttgttgcagaccatcaacctgctcaggaaccgtcgccggttcgcgcaccatggtgcggaaggtttccatctgcgcatcgttgcgcggtattgatttggcttcccgagaacgccccagctgctctgccaggcgtttcagttccggctgttcgttaagaaattcaccgtatttcacaatcaactgatagtcgccacgtttaagctgaccggcgctcatatcccacagacgaccagctgcagtattgttatctgcgagaatcggttcaagttgtccgctcagcgtcatgcgttcctgaacttcactcaacagttgttcgcgttcttcttctaatagctgttgatttaacgtcgttgcttgcacgatcagacttaaacgccaacgctggagaaaaagcgtgtgtaacgctgaagtgatcgtgctgttagcatcaaccaactgtcgggcttgttctgcccatggagaattcagacgatgcagtaagtccaggatctgtggtagctgcacaataaactgtggcgtggagaggagctggctttgctgatagcacatcacctcttcggtgagttccggcgggactcgggcatctttcagccgactgcgcacgcttcacgccagcggggaacatcatcagtgattgccgccttcaggcgtgggaatttttcaaagaagaccgccagctgcggtgaggccagcagtgcgatgatcatctcttcgatcaatccctcttcgctgacggccagcatcacattaagcgtatccagcgttagcattgttgtgcctggcgaatctgtgcaccgacatcctgtaggctggcttcaatgcgacctaaccagtcgccagggataaacagacatttttgctgttcgctgaataaagcgtgttgcttgcgccagtcgctttcaagctcttccagttgttgttttatttcaccaggcagaccttcagccgatgaaccgggaagtgccagcgtactgccttgtaaacttacatcgcgaacgacaagatgttgggcgctatcaacttccagattcagtttctgggcaaagccgataccgttcagtttaccgcgaatttcaccacctttgctcagccactgttccagcgcgctacgctcaaaggagatatgaaccacttccatatcatgcagttttaacggtttttgcagcagtagagtcagagtggaagcagtaacgttaacaggaagttgatactgctgacgacggctgaaaatgccgcccagacgaattaccgttaaggctgttttatcgctttgttgctgctggagttgcaggtgacgttgcacaatcgcgccaaggcgagtcaacatcccttgctgttgccaggcgtgaccggtcatcaatacatcaatttgttgttgtatcaaattcaggctttgcgcgtcataccacaggcaatctttcagcaaaatgagatctaccggggcaacagcactgcgaccgctaaaaaaggcgctggcctgcaataatcggatcgcttttttccagcgacgatccgagacataaggcgcatccggtaatttatccagttgctggcgcagcataaaaatcagctcaaatacatgatcgggcagcgtaatttcaccaatctctttctgccagcgttcatattcttcatctgtgacctgcaaggcatcaggaaccggattgtcgttttcatcctgttgactggtcagcatggagcggaaattcgctttatcctgcactttatctaaccacagacgaatcagcatgcggtcatataacgcttccagactgctgtctgcttccggcagctcgttggaggccgccaccagcagacgcatcgggattttttctacgtgtgcaccgttgcggaactggcgctcgttaatggcggtgagcaaggtattaagaattgccgggcccgctttccagatctcatccagaaagacaatttctgcttccggcaggtaaccgctggttaaacgttcatagcgcccttcatcttttagcgcctgaatagaaaggggaccaaaaacttcttccggcgtggagaagcgggtcatcagatattcaaacgcgcgggcattctgaaaggcgaattttaagcgccgggcgatcaaacttttggcaatacctggcgggccaaggaggaacacactttcaccacttaatgccgctaataaacacaagcggatggcgtggctacgttcataaagccccttttccaacgaactgctcaggcgggaaattctttccgctaataaatgagggtgagccataatgaagtggcgtcctttcgtcaaaagttctgcgtaaattgcgagtatagacgtttcttgctggtggctaaaatagtctcaaagggggggtatttttctttgagccaggttaatgtggccgcatttaggagtacgattttgccgttaatcgtgcatactgtgcgcttttttgtgggccaagggactaagcacacatttcatatttcaacgaaagactagtctatgagcactgataataagcaatcattgcccgcgattaccctcgcggcgattggagttgtctacggcgatattggtaccagcccgttatatacacttcgtgaatgtttgtccggccagtttggttttggcgttgaacgcgatgccgtgtttggctttttatcgctgatcttctggctgctaatctttgtggtttccattaaatatctcaccttcgtgatgcgggcagataacgccggtgagggggggatcctgacgttgatgtcgcttgccgggcgtaatacgtcggcgcgaaccacatcaatgctggtgattatggggctaatcggcggcagctttttctatggtgaagtcgtcataacacccgctatttcggtgatgtcagccattgaaggtctggaaatcgtcgccccgcagctggatacctggatagttcccctctcaattatcgttctcactttattatttatgattcaaaaacatggcacggctatggtcggtaagctgtttgcgccgatcatgctgacctggtttttgattctggcaggactggggttacgtagcattattgctaacccggaagtgctgcatgcgctgaatccaatgtgggcggtgcatttcttccttgaatacaaaacggtttcttttattgcattaggggcagtggtgttgtcgattacgggggtcgaggcgctgtatgctgatatggggcactttggtaagttccctattcgcctggcgtggttcaccgtcgtattaccttccttgacccttaattacttcggtcagggagcgctgttgttaaagaacccggaagcgattaagaacccgttcttcctgttggcaccggactgggcgctgatcccgctgctgatcatcgccgcactggcgacggtaattgcctcgcaggcggttatctctggcgtcttctcattgacgcgtcaggcggtacgtctgggatatttgtcgccgatgcgcattattcacacctccgaaatggagtcagggcaaatctatattccgtttgtgaactggatgctctatgtcgcggtcgtgattgtgattgtcagctttgagcactccagcaacctggcggcggcgtacgggattgcggtgaccggaaccatggtgctgacgtctattctctcgactaccgtggcacgtcagaactggcactggaataagtattttgttgcgctgatcctgattgctttcctttgtgtcgatattccattgttcaccgctaacctcgataaactgctctccggcggctggttgccattgagcctcggtactgtgatgtttatcgtgatgaccacctggaagagcgagcgtttccgcttgctgcggcggatgcatgaacatggtaactctctggaagcgatgattgcttcgctggagaaatcaccgcctgttcgcgtgcccgggaccgcggtgtatatgtcgcgtgcaatcaacgtcattccctttgcgctgatgcataaccttaaacataacaaggtattgcatgagcgggtcgattctgttaactctgcgcaccgaagacgctccatatgtccataacgtccgtcgggtacagattgaacaactgtcgcccactttctggcgcgtggtggcaagttatggttgcgagaaacgccaaacgtagaagaagttttccaccgctgcggtctggaaggattaagttgccggatgatggaaacctccttctttatgtcgcatgagtcgttgatcctcgcaaacgcccgtggtatttgcgtctgcgcggcaagctgtacttgctgctgcaacgtaatgcgctgcgtgcaccagatcaatttgaaatcccgccaaacagggttatcgaactgggtactcaggtcgaaatctaacgccagacgcctcctttcttcataagggggcgtttttgttttcatggttaatcaccatgtaaaacgtttcgaggttgatcacatttccgtaacgtcacgatggttttcccaactcagtcaggattaaactgtgggtcagcgaaacgtttcgctgatggagaaaaaaatgaaaaaaggcaccgttcttaattctgatatttcatcggtgatctcccgtctgggacataccgatacgctggtggtgtgtgatgctggtttacccatccccaaaagtacaacgcgtatcgatatggcattaacccagggtgtaccttcttttatgcaggtgctgggcgtcgtcacaaatgaaatgcaggtcgaggcggccattatcgcggaagagatcaaacaccataatccgcaactccacgaaacgttgctcactcaccttgagcagctgcaaaaacaccagggaaataccattgaaattcgttacaccacgcatgaacaattcaaacaacaaaccgcagaaagtcaggcggtaattcgcagcggagaatgttctccgtatgcgaatatcattctctgtgctggcgtgacgttctgaggccgtcatggaagcattacttcagcttaaaggcatcgataaagccttcccgggcgtaaaagccctctcgggcgcagcgttaaatgtctatccgggccgcgtgatggcgctggtgggcgaaaacggcgcgggtaaatccaccatgatgaaagtgcttactggcatctatactcgcgatgccggtacgcttttatggctggggaaagaaacgacatttaccgggccaaaatcttcccaggaagccgggattgggattatccatcaggaactgaacctgatcccgcagttgaccattgccgaaaacattttcctcggtcgtgagtttgttaatcgctttggcaaaattgactggaaaaccatgtatgccgaagcggataaattgctggctaaacttaacctgcgctttaaaagcgacaagctggtgggcgatctttccatcggtgaccagcaaatggttgaaatcgccaaagtgctgagctttgagtcgaaagtcatcattatggatgaaccgaccgatgcgctgaccgataccgaaaccgaatccctgttccgcgtcatccgcgagctgaaatcgcaaggccgcggtattgtctatatctcccaccgcatgaaagaaatcttcgagatttgcgatgacgttaccgtttttcgtgatgggcaatttattgctgagcgcgaagtggcatcactgaccgaagattcgctgattgagatgatggtgggtcgcaagctggaagatcaatatccgcacctggacaaagcgccgggagatatccgcctgaaagtcgataatctctgcggacctggcgttaacgatgtctcttttactttacgcaaaggcgaaattcttggcgtctctggtttgatgggcgcaggtcgtaccgaactgatgaaagtgctctacggcgcactaccgcgcaccagcggttacgtcaccctggatgggcatgaagtcgttacccgttcaccgcaggatggcctggcaaacggcattgtgtatatctccgaagaccgtaaacgtgacggtttagtgttgggcatgtcagtaaaagagaacatgtcgctgacagcgctgcgctacttcagccgcgctggcggcagtttgaagcatgccgatgaacagcaggctgtgagtgatttcattcgtctgtttaatgtgaaaactccgtcgatggaacaggcaattggtctgctttccggtggcaatcagcaaaaagtggcgattgcccgcggtctgatgacacgccccaaagtgttgatccttgatgaacctacccgtggcgtagatgtcggcgcgaaaaaagagatctatcaactgattaaccagttcaaagccgatggcttgagcatcattctggtgtcatcggagatgccagaagtattaggcatgagcgatcgcatcatcgtcatgcatgaagggcatctcagcggggaatttactcgtgagcaggccacccaggaagtgttaatggctgccgctgtgggcaagcttaatcgcgtgaatcaggagtaaaaaaatgacaacccagactgtctctggtcgccgttatttcacgaaagcgtggctgatggagcagaaatcgcttatcgctctgctggtgctgatcgcgattgtctcgacgttaagcccgaactttttcaccatcaataacttattcaatattctccagcaaacctcagtgaacgccattatggcggtcgggatgacgctggtgatcctgacgtcgggcatcgacttatcggtaggttctctgttggcgctgaccggcgcagttgctgcatctatcgtcggcattgaagtcaatgcgctggtggctgtcgctgctgctctcgcgttaggtgccgcaattggtgcggtaaccggggtgattgtagcgaaaggtcgcgtccaggcgtttatcgctacgctggttatgatgcttttactgcgcggcgtgaccatggtttataccaacggtagcccagtgaataccggctttactgagaacgccgatctgtttggctggtttggtattggtcgtccgctgggcgtaccgacgccagtctggatcatggggattgtcttcctcgcggcctggtacatgctgcatcacacgcgtctggggcgttacatctacgcgctgggcggcaacgaagcggcaacgcgtctttctggtatcaacgtcaataaaatcaaaatcatcgtctattctctttgtggtctgctggcatcgctggccgggatcattgaagtggcgcgtctctcctccgcacaacccacggcggggactggctatgagctggatgctattgctgcggtggttctgggcggtacgagtctggcgggcggaaaaggtcgcattgttgggacgttgatcggcgcattaattcttggcttccttaataatggattgaatttgttaggtgtttcctcctattaccagatgatcgtcaaagcggtggtgattttgctggcggtgctggtagacaacaaaaagcagtaataacgactacaggacatcttgaatatgaacatgaaaaaactggctaccctggtttccgctgttgcgctaagcgccaccgtcagtgcgaatgcgatggcaaaagacaccatcgcgctggtggtctccacgcttaacaacccgttctttgtatcgctgaaagatggcgcgcagaaagaggcggataaacttggctataacctggtggtgctggactcccagaacaacccggcgaaagagctggcgaacgtgcaggacttaaccgttcgcggcacaaaaattctgctgattaacccgaccgactccgacgcagtgggtaatgctgtgaagatggctaaccaggcgaacatcccggttatcactcttgaccgccaggcaacgaaaggtgaagtggtgagccacattgcttctgataacgtactgggcggcaaaatcgctggtgattacatcgcgaagaaagcgggtgaaggtgccaaagttatcgagctgcaaggcattgctggtacatccgcagcccgtgaacgtggcgaaggcttccagcaggccgttgctgctcacaagtttaatgttcttgccagccagccagcagattttgatcgcattaaaggtttgaacgtaatgcagaacctgttgaccgctcatccggatgttcaggctgtattcgcgcagaatgatgaaatggcgctgggcgcgctgcgcgcactgcaaactgccggtaaatcggatgtgatggtcgtcggatttgacggtacaccggatggcgaaaaagcggtgaatgatggcaaactagcagcgactatcgctcagctacccgatcagattggcgcgaaaggcgtcgaaaccgcagataaagtgctgaaaggcgagaaagttcaggctaagtatccggttgatctgaaactggttgttaagcagtagttttaatcaggttgtatgacctgatggtgacataaatacgtcatcgacagatgaacgtgtaatataaagaaaagcagggcacgcgccaccctaacacggtggcgcattttatggacatcccgaatatgcaaaacgcaggcagcctcgttgttcttggcagcattaatgctgaccacattcttaatcttcaatcttttcctactccaggcgaaaccgtaaccggtaaccactatcaggttgcatttggcggcaaaggcgcgaatcaggctgtggctgctgggcgtagcggtgcgaatatcgcgtttattgcctgtacgggtgatgacagcattggtgagagcgttcgccagcagctcgccactgataacattgatattactccggtcagcgtgatcaaaggcgaatcaacaggtgtggcgctgatttttgttaatggcgaaggtgagaatgtcatcggtattcatgccggcgctaatgctgccctttccccggcgctggtggaagcgcaacgtgagcgtattgccaacgcgtcagcattattaatgcagctggaatcaccactcgaaagtgtgatggcagcggcgaaaatcgcccatcaaaataagactatcgttgcgcttaacccggctccggctcgcgaacttcctgacgaactgctggcgctggtggacattattacgccaaacgaaacggaagcagaaaagctcaccggtattcgtgttgaaaatgatgaagatgcagcgaaggcggcgcaggtactgcatgaaaaaggtatccgtactgtactgattactttaggaagtcgtggtgtatgggctagcgtgaatggtgaaggtcagcgcgttcctggattccgggtgcaggctgtcgataccattgctgccggagatacctttaacggtgcgttaatcacggcattgctggaagaaaaaccattgccagaggcgattcgttttgcccatgctgccgctgcgattgccgtaacacgtaaaggcgcacaaccttccgtaccgtggcgtgaagagatcgacgcatttttagacaggcagaggtgacgcttggctacaatgaaagatgttgcccgcctggcgggcgtttctacctcaacagtttctcacgttatcaataaagatcgcttcgtcagtgaagcgattaccgccaaagttgaagcggcgattaaagaactcaattacgcgccatcagctctggcgcgtagcctcaaactcaatcaaacacataccattggcatgttgatcactgccagtaccaatcctttctattcagaactggtgcgtggcgttgaacgcagctgcttcgaacgcggttatagtctcgtcctttgcaataccgaaggcgatgaacagcggatgaatcgcaatctggaaacgctgatgcaaaaacgcgttgatggcttgctgttactgtgcaccgaaacgcatcaaccttcgcgtgaaatcatgcaacgttatccgacagtgcctactgtgatgatggactgggctccgttcgatggcgacagcgatcttattcaggataactcgttgctgggcggagacttagcaacgcaatatctgatcgataaaggtcatacccgtatcgcctgtattaccggcccgctggataaaactccggcgcgcctgcggttggaaggttatcgggcggcgatgaaacgtgcgggtctcaacattcctgatggctatgaagtcactggtgattttgaatttaacggcgggtttgacgctatgcgccaactgctatcacatccgctgcgtcctcaggccgtctttaccggaaatgacgctatggctgttggcgtttaccaggcgttatatcaggcagagttacaggttccgcaggatatcgcggtgattggctatgacgatatcgaactggcaagctttatgacgccaccattaaccactatccaccaaccgaaagatgaactgggggagctggcgattgatgtactcatccatcggataacccagccgacccttcagcaacaacgattacaacttactccgattctgatggaacgcggttcggcttagatttacgctgtcttttgatcaaattattaccatcggttgttttcagaagcatgaacattgctgctgaagcaacagtaataatgcccattgtgataaacgtatagtggaattgttcgacagtcgttgtgccttccattccttcataaacgcgaaggacggccgcacttacagcaacgcctaaactaatcgacagttgctgcgtgaccgccagaacactgttaccgctgctggcattgtcatcggtcagatcggcaagtgtgatggtattcatcgcggtaaactgcgtcgacatagccatccctaatataaacaacggcaagatcagcatccatatagccattgctggtgattgcaaagagaactgagcgatcattagcccaataatcaccgtgatccccactaacgtatggcgatagcccagacgacgtaagacttgggtaaccatcgattttgcaataatggaacctaacgctgtcggtgccatcatacagccagcaataaacgcctgataaccaaatcctacctgtaacatcaatggcataaggaacggtacacagccggtccccagacgggttgcaatattgcctacgataccgatcgagaaagtgcgggttttaaataaatctaatgaaattaatgggtttggcgtgcgtcgtgcatggagaatatagagaagcagtaacccgatgctggtgacaattaccgtcaaggcaatccagctggcgacaatcttttccccgaatagctctattccgcttgagaagagaacaaggctgaggccaaacagcaaaaagccagtgatatcgaatctgcgtcgtgcggtggtgaaattgggcatatgtttgcgcgcgtaaagaaggcccgcaatacctatggggatattgattaaaaatatccagtgccaggttgcccaggtgaccagcacgccgccaagaacggggcctaaaattggccccaccagacccggcatggcgacaaaattcaatactggaagaagttcattacgaggataagcgcgcagtaaggccagccgagcaacaggcatcatcattgcgccgcctatcccctgaataacccggaagacaaccagctgtggtagcgaattagaaagtgcgcaggccagagaacccaatgtgaacagactcacggcaagggtaaaaatgcgacgcgtaccgaagcgatcggctagccatccgcttaccggaataagcatcgccaccgtcagcgtataactgatgatggctgattgcatcgcgagaggagaacgattaaggctatgagcgattgcgggtaaggcggtattaagaatagtggcatcaagtgcctgcatgaagaaggccatcgccgcgatccacggcaaacccgccatactgcgcttctttttatcgctcattcaatgtcctgttatcgggttatcacttatcaggtgagcgtagcagcgcctgacaagctttaaatgccgcgtcgccatcgctttggataatcgcatcgacaatcgcctgatgcagatccagctttatcactgtgtcgctggtaattgacgtgaagtaagtgtgataaaccgaatggaatagcgaggcgaatgaggtcaaaaacggattggcgctcatttcatagatatgctcatgccaggccatatcgacttcgatccagcgttcacggcgaaagttctcttttaatgccgccatttcggccattaacgtattgagatgcgctttctgttccgcggtgccaaccgttgccagtaggcaggcttgcggctccagacagatacgcataaccagaaagtgatcgatgacctgatgaaagttctcttctgtcatccaccaggtaagcaattcctgatcaagaaaattccagttcgattgtggcatgacccgagtaccaattcgcggtcgcggtaaaaccatcccttttgccgttaacgttttgaccgcttcgcgtaccgctgtacgactcactccaaattgctcgcccagctcaatctcaccgggcaaaatggtgccgggttcatattcaccttttaagatccgttgcgccagcttctcagccagaacatacgaaaggtttttctgtgcagctaactgttgtgcgcttaaaggcattacttatcttcctttttctttttattcctccttagtatgccaccaggaagtgtgattacggttgcaaaaacggcaaattgcttgttttatggcacattaacggggcttttgctgaaaaaatgcgcggtcagaaaattattttaaatttcctcttgtcaggccggaataactccctataatgcgccaccactgacacggaacaacggcaaacacgccgccgggtcagcggggttctcctgagaactccggcagagaaagcaaaaataaatgcttgactctgtagcgggaaagcgtattatgcacaccccgcgccgctgagaaaaagcaaagcggcactgctctttaacaatttatcagacaatctgtgtgggcactcgaagatacggattcttaacgtcgcaagacgaaaaatgaataccaagtctcaagagtgaacacgtaattcattacgaagtttaattctttgagcatcaaacttttaaattgaagagtttgatcatggctcagattgaacgctggcggcaggcctaacacatgcaagtcgaacggtaacaggaaacagcttgctgtttcgctgacgagtggcggacgggtgagtaatgtctgggaaactgcctgatggagggggataactactggaaacggtagctaataccgcataacgtcgcaagaccaaagagggggaccttcgggcctcttgccatcagatgtgcccagatgggattagctagtaggtggggtaacggctcacctaggcgacgatccctagctggtctgagaggatgaccagccacactggaactgagacacggtccagactcctacgggaggcagcagtggggaatattgcacaatgggcgcaagcctgatgcagccatgccgcgtgtatgaagaaggccttcgggttgtaaagtactttcagcggggaggaagggagtaaagttaatacctttgctcattgacgttacccgcagaagaagcaccggctaactccgtgccagcagccgcggtaatacggagggtgcaagcgttaatcggaattactgggcgtaaagcgcacgcaggcggtttgttaagtcagatgtgaaatccccgggctcaacctgggaactgcatctgatactggcaagcttgagtctcgtagaggggggtagaattccaggtgtagcggtgaaatgcgtagagatctggaggaataccggtggcgaaggcggccccctggacgaagactgacgctcaggtgcgaaagcgtggggagcaaacaggattagataccctggtagtccacgccgtaaacgatgtcgacttggaggttgtgcccttgaggcgtggcttccggagctaacgcgttaagtcgaccgcctggggagtacggccgcaagttaaaactcaaatgaattgacgggggcccgcacaagcggtggagcatgtggtttaattcgatgcaacgcgaagaaccttacctggtcttgacatccacggaagttttcagagatgagaatgtgccttcgggaaccgtgagacaggtgctgcatggctgtcgtcagctcgtgttgtgaaatgttgggttaagtcccgcaacgagcgcaacccttatcctttgttgccagcggtccggccgggaactcaaaggagactgccagtgataaactggaggaaggtggggatgacgtcaagtcatcatggcccttacgaccagggctacacacgtgctacaatggcgcatacaaagagaagcgacctcgcgagagcaagcggacctcataaagtgcgtcgtagtccggattggagtctgcaactcgactccatgaagtcggaatcgctagtaatcgtggatcagaatgccacggtgaatacgttcccgggccttgtacacaccgcccgtcacaccatgggagtgggttgcaaaagaagtaggtagcttaaccttcgggagggcgcttaccactttgtgattcatgactggggtgaagtcgtaacaaggtaaccgtaggggaacctgcggttggatcacctccttaccttaaagaagcgttctttgcagtgctcacacagattgtctgataggaagtgaaaagcaaggcgtcttgcgaagcagactgatacgtccccttcgtctagaggcccaggacaccgccctttcacggcggtaacaggggttcgaatcccctaggggacgccacttgctggtttgtgagtgaaagtcacctgccttaatatctcaaaactcatcttcgggtgatgtttgagatatttgctctttaaaaatctggatcaagctgaaaattgaaacactgaacaacgaaagttgttcgtgagtctctcaaattttcgcaacacgatgatgaatcgaaagaaacatcttcgggttgtgaggttaagcgactaagcgtacacggtggatgccctggcagtcagaggcgatgaaggacgtgctaatctgcgataagcgtcggtaaggtgatatgaaccgttataaccggcgatttccgaatggggaaacccagtgtgtttcgacacactatcattaactgaatccataggttaatgaggcgaaccgggggaactgaaacatctaagtaccccgaggaaaagaaatcaaccgagattcccccagtagcggcgagcgaacggggagcagcccagagcctgaatcagtatgtgtgttagtggaagcgtctggaaaggcgcgcgatacagggtgacagccccgtacacaaaaatgcacatattgtgagctcgatgagtagggcgggacacgtggtatcctgtctgaatatgggagggaccatcctccaaggctaaatactcctgactgaccgatagtgaaccagtaccgtgagggaaaggcgaaaagaaccccggcgaggggagtgaaaaagaacctgaaaccgtgtacgtacaagcagtgggagcacgcttaggcgtgtgactgcgtaccttttgtataatgggtcagcgacttatattctgtagcaaggttaaccgaataggggagccgaagggaaaccgagtcttaactgggcgttaagttgcagggtatagacccgaaacccggtgatctagccatgggcaggttgaaggttgggtaacactaactggaggaccgaaccgactaatgttgaaaaattagcggatgacttgtggctgggggtgaaaggccaatcaaaccgggagatagctggttctccccgaaagctatttaggtagcgcctcgtgaattcatctccgggggtagagcactgtttcggcaagggggtcatcccgacttaccaacccgatgcaaactgcgaataccggagaatgttatcacgggagacacacggcgggtgctaacgtccgtcgtgaagagggaaacaacccagaccgccagctaaggtcccaaagtcatggttaagtgggaaacgatgtgggaaggcccagacagccaggatgttggcttagaagcagccatcatttaaagaaagcgtaatagctcactggtcgagtcggcctgcgcggaagatgtaacggggctaaaccatgcaccgaagctgcggcagcgacgcttatgcgttgttgggtaggggagcgttctgtaagcctgcgaaggtgtgctgtgaggcatgctggaggtatcagaagtgcgaatgctgacataagtaacgataaagcgggtgaaaagcccgctcgccggaagaccaagggttcctgtccaacgttaatcggggcagggtgagtcgacccctaaggcgaggccgaaaggcgtagtcgatgggaaacaggttaatattcctgtacttggtgttactgcgaaggggggacggagaaggctatgttggccgggcgacggttgtcccggtttaagcgtgtaggctggttttccaggcaaatccggaaaatcaaggctgaggcgtgatgacgaggcactacggtgctgaagcaacaaatgccctgcttccaggaaaagcctctaagcatcaggtaacatcaaatcgtaccccaaaccgacacaggtggtcaggtagagaataccaaggcgcttgagagaactcgggtgaaggaactaggcaaaatggtgccgtaacttcgggagaaggcacgctgatatgtaggtgaagcgacttgctcgtggagctgaaatcagtcgaagataccagctggctgcaactgtttattaaaaacacagcactgtgcaaacacgaaagtggacgtatacggtgtgacgcctgcccggtgccggaaggttaattgatggggtcagcgcaagcgaagctcttgatcgaagccccggtaaacggcggccgtaactataacggtcctaaggtagcgaaattccttgtcgggtaagttccgacctgcacgaatggcgtaatgatggccaggctgtctccacccgagactcagtgaaattgaactcgctgtgaagatgcagtgtacccgcggcaagacggaaagaccccgtgaacctttactatagcttgacactgaacattgagccttgatgtgtaggataggtgggaggctttgaagtgtggacgccagtctgcatggagccgaccttgaaataccaccctttaatgtttgatgttctaacgtggacccgtgatccgggttgcggacagtgtctggtgggtagtttgactggggcggtctcctcctaaagagtaacggaggagcacgaaggttggctaatcctggtcggacatcaggaggttagtgcaatggcataagccagcttgactgcgagcgtgacggcgcgagcaggtgcgaaagctaggtcatagtgatccggtggttctgaatggaagggccatcgctcaacggataaaaggtactccgggataacaggctgataccgcccaagagttcatatcgacggcggtgtttggcacctcgatgtcggctcatcacatcctggagctgaagtaggtcccaagggtatggctgttcgccatttaaagtggtacgcgagctgggtttagaacgtcgtgagacagttcggtccctatctgccgtgggcgctggagaactgaggggggctgctcctagtacgagaggaccggagtggacgcatcactggtgttcgggttgtcatgccaatggcactgcccggtagctaaatgcggaagagataagtgctgaaagcatctaagcacgaaacttgccccgagatgagttctccctgactcctttaagggtcctgaaggaacgttgaagacgacgacgttgataggccgggtgtgtaagcgcagcgatgcgttgagctaaccggtactaatgaaccgtgaggcttaaccttacaacgccgaagctgttttggcggatgagagaagattttcagcctgatacagattaaatcagaacgcagaagcggtctgatgaaacagaatttgcctggcggccgtagcgcggtggtcccacctgaccccatgccgaactcagaagtgaaacgccgtagcgccgatggtagtgtggggtctccccatgcgagagtagggaactgccaggcatcaaattaagcagtaagccggtcataaaaccggtggttgtaaaagaattcggtggagcggtagttcagtcggttagaatacctgcctgtcacgcagggggtcgcgggttcgagtcccgtccgttccgccaccctaattaggggcgtagttcaattggtagagcaccggtctccaaaaccgggtgttgggagttcgagtctctccgcccctgccagaaatcatccttagcgaaacgtaaggattttttttatctgaaataaccctctccgaagtaaatccttctaccggcatccttgccagccattcatattaatacacttcatccagcacgttaattttcaaaagatcgcgaatcaacgcatttttatcgctattttgcagccatatggcataaagcggccgtgaaagtgttgtgctatcgacaacggtatgcaggccgccttttttacgcgcccagctgacgggtagccaggtgcaaccattaagcatcgcaatctgttgctgtgccagttcagcagaactggttgtcagaatgggcacttcgtcagcaccgatcaaacctgcctcatgctgttgaaaatctggcccccactcaagtcgcagataattaagatctccctttagttttgaaggggcactggtataaagcgctaaagtgaaatatcccagcaactgactactaaattcgtccattttgggcgcttcagtggtaataagaagatcaagctggcgttcatgcagctgttttaccagagactgccgttgggcaattcgcgcttcgaactgtaagcctgtatgggcatcctgattttgatacaagcgtcccagccactgattaagcatacattcccacaacgaggcgctggcaccgatagaaaactcgttatgtcgtgaggtatgcgccacctcttacgggcggcctgccaggtgctcatgagcgtttctgcataaggcagtagtttttcaccggcagcggttaaacggatattgtttctgtggcgggtgaaaaggttcacacccagttgattttccagttgtctgattcgaaagctcactgctgactgggtcagatagagcgattcagccgctcgaccaaagtgacgcgttcggctaacttccaggaaagtttttaacaattccgtatccacagtgctctccgcaaaattatttgtcgttatgatttaaatgttttgttttacactctgtcaagcgtaactaatactccgcgccataactagctcggtcaaagaattaggagcgtgcaggatggcggaaagctttacgacgactaatcgatatttcgacaataaacattatccacgtggattctctcgtcatggtgatttcaccatcaaagaggcacaactgcttgagcgtcatggttatgccttcaatgagttggatcttggcaaacgcgagccggttaccgaggaagagaaactcttcgtagcagtatgccgtggcgaacgtgagccagtgacagaagcagaacgcgtgtggtccaagtatatgacgcgtattaagcgtccaaaacgttttcacaccctttccggcggtaaaccgcaggttgaaggtgctgaagactacaccgattctgacgattaataaaaagggcgaaatgccctttttttatgtcagtagtttctgcagatggatgagcaaacggtcaatcgctcgatagctaactgcctcctgcaaatgctgacgtgtgataatgtcagactgatcaatatcagcaatggttcgtgcaactttcaataaccgctgccaggcacgaatcgataaccccagatggatcagtgttccttccaaccacatcgcatcttcgctctcaagtttgcagaattggcgtatttccggactatccagccaggcattcagtttattctgccgcttaaattggcgctctctggcggccattacgcgttgtttaacggtggcgctgctttctcccggcactaccgttttactcaaaatgccggggggtggtaatgggatctccagtgagagatcgaagcggtcgagaaagggccccgagagccggttgagataacgtaatgtctgttctggcgtgcagcggttatggtttccctgataatgtccggtagggctgggattcatcgccgcaacaagctggaaacgggctggataggttatttttgctcgtgtgcgtgaaagatggatctgcccggattcaatcggctctcgcaaggcatccagtgtacgccgttcaaattcaggtagctcatcaagaaaaagcacgccgttatgcgccagcgaaatttcaccgggccctggaattgcgccaccgcctaccatcgcagttaacgatgcactgtgatgaggtgagcggaacgggcgctgccgccattgtttttgtactgattcagcatttaccagacttaatatcgcagcactctccagtgcctcttcattgcttaaatctggcaacaggccattaatacggctggcgagcattgttttacctgttcccggcggcccaatcagtaaaaggttgtgcccgccagcagcggtaatttccagtcctcgctttccttgttcctgaccgataacatcactgagatcatgttgtagcgcccgggatactgcatcagttggtttcgggcgttcgagagcgtgcttaccttccagaaacgcacagacagcttgcagatgatcggctatcaggcatccttcaccgttaattagccccacttcatcttcgttatctttcgcgacgataatttttctgcccgacttaatagcttcagttgcactggagattgcgccgggaacgccacgcagagcgcctgtaagcgccagttctccgactaattcatattcatctaacttattggctgtaagctgttctgaggccgccagcaacgcaatggcgataggtaaatcatatcgtcccccttcttttggcagatcagctggagccaggttgatggtgatttttttcgccggatattcatatccgctattgataatggcgctgcgcacgcgatcgcgagcttcttttaccgttgtttctggtaagcccaccatcgttaagccgggtagacctttactgatatgtacctcaacagtgatcgggggcgcatttactcccagggctgcgcgggtatgaacaattgacagtgacataagccctccttgagtcaccattatgtgcataagatatcgctgctgtagcccgctaattcgtgaattttagtggctgattcctgtttatttgtgcaagtgaagttgagttgttctggcggtggaatgatgctcgcaaaaatgcagcggacaaaggatgaactacgaggaagggaacaacattcatactgaaattgaatttttttcactcactattttatttttaaaaaacaacaatttatattgaaattattaaacgcatcataaaaatcggccaaaaaatatcttgtactatttacaaaacctatggtaactctttaggcattccttcgaacaagatgcaagaaaagacaaaatgacagcccttctacgagtgattagcctggtcgtgattagcgtggtggtgattattatcccaccgtgcggggctgcacttggacgaggaaaggcttagagatcaagccttaacgaactaagacccccgcaccgaaaggtccgggggttttttttgaccttaaaaacataaccgaggagcagacaatgaataacagcacaaaattctgtttctcaagattcaggacggggaactaactatgaatggcgcacagtgggtggtacatgcgttgcgggcacagggtgtgaacaccgttttcggttatccgggtggcgcaattatgccggtttacgatgcattgtatgacggcggcgtggagcacttgctatgccgacatgagcagggtgcggcaatggcggctatcggttatgctcgtgctaccggcaaaactggcgtatgtatcgccacgtctggtccgggcgcaaccaacctgataaccgggcttgcggacgcactgttagattccatccctgttgttgccatcaccggtcaagtgtccgcaccgtttatcggcactgacgcatttcaggaagtggatgtcctgggattgtcgttagcctgtaccaagcacagctttctggtgcagtcgctggaagagttgccgcgcatcatggctgaagcattcgacgttgcctgctcaggtcgtcctggtccggttctggtcgatatcccaaaagatatccagttagccagcggtgacctggaaccgtggttcaccaccgttgaaaacgaagtgactttcccacatgccgaagttgagcaagcgcgccagatgctggcaaaagcgcaaaaaccgatgctgtacgttggcggtggcgtgggtatggcgcaggcagttccggctttgcgtgaatttctcgctgccacaaaaatgcctgccacctgtacgctgaaagggctgggcgcagtagaagcagattatccgtactatctgggcatgctggggatgcacggcaccaaagcggcaaacttcgcggtgcaggagtgtgacctgctgatcgccgtgggcgcacgttttgatgaccgggtgaccggcaaactgaacaccttcgcgccacacgccagtgttatccatatggatatcgacccggcagaaatgaacaagctgcgtcaggcacatgtggcattacaaggtgatttaaatgctctgttaccagcattacagcagccgttaaatcaatgactggcagcaacactgcgcgcagctgcgtgatgaacattcctggcgttacgaccatcccggtgacgctatctacgcgccgttgttgttaaaacaactgtcggatcgtaaacctgcggattgcgtcgtgaccacagatgtggggcagcaccagatgtgggctgcgcagcacatcgcccacactcgcccggaaaatttcatcacctccagcggtttaggtaccatgggttttggtttaccggcggcggttggcgcacaagtcgcgcgaccgaacgataccgttgtctgtatctccggtgacggctctttcatgatgaatgtgcaagagctgggcaccgtaaaacgcaagcagttaccgttgaaaatcgtcttactcgataaccaacggttagggatggttcgacaatggcagcaactgttttttcaggaacgatacagcgaaaccacccttactgataaccccgatttcctcatgttagccagcgccttcggcatccatggccaacacatcacccggaaagaccaggttgaagcggcactcgacaccatgctgaacagtgatgggccatacctgcttcatgtctcaatcgacgaacttgagaacgtctggccgctggtgccgcctggcgccagtaattcagaaatgttggagaaattatcatgatgcaacatcaggtcaatgtatcggctcgcttcaatccagaaaccttagaacgtgttttacgcgtggtgcgtcatcgtggtttccacgtctgctcaatgaatatggccgccgccagcgatgcacaaaatataaatatcgaattgaccgttgccagcccacggtcggtcgacttactgtttagtcagttaaataaactggtggacgtcgcacacgttgccatctgccagagcacaaccacatcacaacaaatccgcgcctgagcgcaaaaggaatataaaaatgaccacgaagaaagctgattacatttggttcaatggggagatggttcgctgggaagacgcgaaggtgcatgtgatgtcgcacgcgctgcactatggcacttcggtttttgaaggcatccgttgctacgactcgcacaaaggaccggttgtattccgccatcgtgagcatatgcagcgtctgcatgactccgccaaaatctatcgcttcccggtttcgcagagcattgatgagctgatggaagcttgtcgtgacgtgatccgcaaaaacaatctcaccagcgcctatatccgtccgctgatcttcgtcggtgatgttggcatgggagtaaacccgccagcgggatactcaaccgacgtgattatcgctgctttcccgtggggagcgtatctgggcgcagaagcgctggagcaggggatcgatgcgatggtttcctcctggaaccgcgcacgaccaaacaccatcccgacggcggcaaaagccggtggtaactacctctcttccctgctggtgggtagcgaagcgcgccgccacggttatcaggaaggtatcgcgctggatgtgaacggttatatctctgaaggcgcaggcgaaaacctgtttgaagtgaaagatggtgtgctgttcaccccaccgttcacctcctccgcgctgccgggtattacccgtgatgccatcatcaaactggcgaaagagctgggaattgaagtacgtgagcaggtgctgtcgcgcgaatccctgtacctggcggatgaagtgtttatgtccggtacggcggcagaaatcacgccagtgcgcagcgtagacggtattcaggttggcgaaggccgttgtggcccggttaccaaacgcattcagcaagccttcttcggcctcttcactggcgaaaccgaagataaatggggctggttagatcaagttaatcaataaatacaaaaaatgggacggcacgcaccgtcccatttacgagacagacactgggagtaaataaagtatgcctaagtaccgttccgccaccaccactcatggtcgtaatatggcgggtgctcgtgcgctgtgggcccaccggaatgaccgacgccgatttcggtaagccgattatcgcggttgtgaactcgttcacccaatttgtaccgggtcacgtccatctgcgcgatctcggtaaactggtcgccgaacaaattgaagcggctggcggcgttgccaaagagttcaacaccattgcggtggatgatgggattgccatgggccacggggggatgctttattcactgccatctcgcgaactgatcgctgattccgttgagtatatggtcaacgcccactgcgccgacgccatggtctgcatctctaactgcgacaaaatcaccccggggatgctgatggcttccctgcgcctgaatattccggtgatctttgtttccggcggcccgatggaggccgggaaaaccaaactttccgatcagatcatcaagctcgatctggttgatgcgatgatccagggcgcagacccgaaagtatctgactcccagagcgatcaggttgaacgttccgcgtgtccgacctgcggttcctgctccgggatgtttaccgctaactcaatgaactgcctgaccgaagcgctgggcctgtcgcagccgggcaacggctcgctgctggcaacccacgccgaccgtaagcagctgttccttaatgctggtaaacgcattgttgaattgaccaaacgttattacgagcaaaacgacgaaagtgcactgccgcgtaatatcgccagtaaggcggcgtttgaaaacgccatgacgctggatatcgcgatgggtggatcgactaacaccgtacttcacctgctggcggcggcgcaggaagcggaaatcgacttcaccatgagtgatatcgataagctttcccgcaaggttccacagctgtgtaaagttgcgccgagcacccagaaataccatatggaagatgttcaccgtgctggtggtgttatcggtattctcggcgaactggatcgcgcggggttactgaaccgtgatgtgaaaaacgtacttggcctgacgttgccgcaaacgctggaacaatacgacgttatgctgacccaggatgacgcggtaaaaaatatgttccgcgcaggtcctgcaggcattcgtaccacacaggcattctcgcaagattgccgttgggatacgctggacgacgatcgcgccaatggctgtatccgctcgctggaacacgcctacagcaaagacggcggcctggcggtgctctacggtaactttgcggaaaacggctgcatcgtgaaaacggcaggcgtcgatgacagcatcctcaaattcaccggcccggcgaaagtgtacgaaagccaggacgatgcggtagaagcgattctcggcggtaaagttgtcgccggagatgtggtagtaattcgctatgaaggcccgaaaggcggtccggggatgcaggaaatgctctacccaaccagcttcctgaaatcaatgggtctcggcaaagcctgtgcgctgatcaccgacggtcgtttctctggtggcacctctggtctttccatcggccacgtctcaccggaagcggcaagcggcggcagcattggcctgattgaagatggtgacctgatcgctatcgacatcccgaaccgtggcattcagttacaggtaagcgatgccgaactggcggcgcgtcgtgaagcgcaggacgctcgaggtgacaaagcctggacgccgaaaaatcgtgaacgtcaggtctcctttgccctgcgtgcttatgccagcctggcaaccagcgccgacaaaggcgcggtgcgcgataaatcgaaactggggggttaataatggctgactcgcaacccctgtccggtgctccggaaggtgccgaatatttaagagcagtgctgcgcgcgccggtttacgaggcggcgcaggttacgccgctacaaaaaatggaaaaactgtcgtcgcgtcttgataacgtcattctggtgaagcgcgaagatcgccagccagtgcacagctttaagctgcgcggcgcatacgccatgatggcgggcctgacggaagaacagaaagcgcacggcgtgatcactgcttctgcgggtaaccacgcgcagggcgtcgcgttttcttctgcgcggttaggcgtgaaggccctgatcgttatgccaaccgccaccgccgacatcaaagtcgacgcggtgcgcggcttcggcggcgaagtgctgctccacggcgcgaactttgatgaagcgaaagccaaagcgatcgaactgtcacagcagcaggggttcacctgggtgccgccgttcgaccatccgatggtgattgccgggcaaggcacgctggcgctggaactgctccagcaggacgcccatctcgaccgcgtatttgtgccagtcggcggcggcggtctggctgctggcgtggcggtgctgatcaaacaactgatgccgcaaatcaaagtgatcgccgtagaagcggaagactccgcctgcctgaaagcagcgctggatgcgggtcatccggttgatctgccgcgcgtagggctatttgctgaaggcgtagcggtaaaacgcatcggtgacgaaaccttccgtttatgccaggagtatctcgacgacatcatcaccgtcgatagcgatgcgatctgtgcggcgatgaaggatttattcgaagatgtgcgcgcggtggcggaaccctctggcgcgctggcgctggcgggaatgaaaaaatatatcgccctgcacaacattcgcggcgaacggctggcgcatattctttccggtgccaacgtgaacttccacggcctgcgctacgtctcagaacgctgcgaactgggcgaacagcgtgaagcgttgttggcggtgaccattccggaagaaaaaggcagcttcctcaaattctgccaactgcttggcgggcgttcggtcaccgagttcaactaccgttttgccgatgccaaaaacgcctgcatctttgtcggtgtgcgcctgagccgcggcctcgaagagcgcaaagaaattttgcagatgctcaacgacggcggctacagcgtggttgatctctccgacgacgaaatggcgaagctacacgtgcgctatatggtcggcggacgtccatcgcatccgttgcaggaacgcctctacagcttcgaattcccggaatcaccgggcgcgctgctgcgcttcctcaacacgctgggtacgtactggaacatttctttgttccactatcgcagccatggcaccgactacgggcgcgtactggcggcgttcgaacttggcgaccatgaaccggatttcgaaacccggctgaatgagctgggctacgattgccacgacgaaaccaataacccggcgttcaggttctttttggcgggttagggaaaaatgcctgatagcgcttcgcttatcaggcctacccgcgcgacaacgtcatttgtggttcggcaaaatcttccagaatgcctcaattagcggctcatgtagccgctttttctgcgcacacacgcccagctcaaacggcgttttctcatcgctgcgctctaaaatcatcacgcggttacgcaccggttcggggctgttttccagcaccacttccggcaacaatgccacgccacagccgagtgccaccatcgataccatcgcttcatgcccgccaaccgtggcgtaaatcatcgggttactgattttattgcgtcgaaaccacagttcaatgcggcggcgtaccggcccctgatcggccataataaacggcaccgttgaccagtccggcttctctaccgacacctgattacgcaccgggcagggcagcgcgggggcaatcagcactactgccagattctccagcatcgaaaacgccactgcgccgggcaaggtttccggtttacccgcaatcgccagatccgcttcaccagtgaccaccttttccatcgcatctgccgcatcaccagtagtaagtttaatctccaccgacgggtgttccgcgcggaagcgatccagaatcggcggcagatggctgtaggcagcggtcaccgagcagaagatatgtaattcgccagagagcgacggcccttgctgatcgatggtgtggcgcaactgctgatactgcaacagcgtttgctgggcgaaaacgcgcagctcttcgcccgcttcagtcagcgtcaccgtgcggttatcgcgcacaaacagcggctgaccgagatcttcttccaggcgctgaatctgccgtgagagcgtggatgggctaacgtgcatcgcccgcgcgctgcggccaaaatggcggctttccgccagatgcaggaaggttttcagatcgcgtaaatccacagggacagccctcgatgttgacgttgcaaaaattgcaatgtgacgttgtgaatatatcaatttccgcaataaatttcctgtcatatagtgaattcaatctcgcaaacgcgaaccgaacaataagaagcacaacatcacgaggaatcaccatggctaactacttcaatacactgaatctgcgccagcagctggcacagctgggcaaatgtcgctttatgggccgcgatgaattcgccgatggcgcgagctaccttcagggtaaaaaagtagtcatcgtcggctgtggcgcacagggtctgaaccagggcctgaacatgcgtgattctggtctcgatatctcctacgctctgcgtaaagaagcgattgccgagaagcgcgcgtcctggcgtaaagcgaccgaaaatggttttaaagtgggtacttacgaagaactgatcccacaggcggatctggtgattaacctgacgccggacaagcagcactctgatgtagtgcgcaccgtacagccactgatgaaagacggcgcggcgctgggctactcgcacggtttcaacatcgtcgaagtgggcgagcagatccgtaaagatatcaccgtagtgatggttgcgccgaaatgcccaggcaccgaagtgcgtgaagagtacaaacgtgggttcggcgtaccgacgctgattgccgttcacccggaaaacgatccgaaaggcgaaggcatggcgattgccaaagcctgggcggctgcaaccggtggtcaccgtgcgggtgtgctggaatcgtccttcgttgcggaagtgaaatctgacctgatgggcgagcaaaccatcctgtgcggtatgttgcaggctggctctctgctgtgcttcgacaagctggtggaagaaggtaccgatccagcatacgcagaaaaactgattcagttcggttgggaaaccatcaccgaagcactgaaacagggcggcatcaccctgatgatggaccgtctctctaacccggcgaaactgcgtgcttatgcgctttctgaacagctgaaagagatcatggcacccctgttccagaaacatatggacgacatcatctccggcgaattctcttccggtatgatggcggactgggccaacgatgataagaaactgctgacctggcgtgaagagaccggcaaaaccgcgtttgaaaccgcgccgcagtatgaaggcaaaatcggcgagcaggagtacttcgataaaggcgtactgatgattgcgatggtgaaagcgggcgttgaactggcgttcgaaaccatggtcgattccggcatcattgaagagtctgcatattatgaatcactgcacgagctgccgctgattgccaacaccatcgcccgtaagcgtctgtacgaaatgaacgtggttatctctgataccgctgagtacggtaactatctgttctcttacgcttgtgtgccgttgctgaaaccgtttatggcagagctgcaaccgggcgacctgggtaaagctattccggaaggcgcggtagataacgggcaactgcgtgatgtgaacgaagcgattcgcagccatgcgattgagcaggtaggtaagaaactgcgcggctatatgacagatatgaaacgtattgctgttgcgggttaagtgcgcgctgatgccctcaccccgactctcccacagggagagggagaaaacactcaagccttctcctggagaaggccttgctattagttgcggtacagcaccttaatgatgtgatatccgaactgggtgtgcagcgggccggtcggctccagtaccggacaagagaaaaccactttatcgaacgccggaaccatctgaccctggcggaattcacctaaatcaccgccgcgtttgcctgatgggcaaatggagtgtttcttcgccagcttgccgaaatcggccccgttcttaatctgctcgagaagatccagagccagtttctcttcttttacaaggatatgcagtgctgctgctgtttttgccatgatcgtgccttgagtgaataattgtcaggcggcgattttagcatgatccgcagatgctaacgtaattgtcagtcagggagtggctggtacatatatggcaaaagcccggaaaatcctgctcgcaggtcctcaaggggagaaaacttagggcctctatgggctacaaagtcattatcggggatggttattttattgtcaatttatgagcgatatggcattgattgacttgatgaccgccctctgtatgtctgcaaccaactcatgtggcaaacattgattaagataccctctgtaagtccttgctctgtttaatctgtttcgactgacttgttgtaccaggtcggctttggcccaacgaatctgctgatcaaagaattgcaggtcattgataacattactggctatttcaacatgcattccacgttttaacttgtctggtcgcgagtggttgataatggaacgacgatgcatgcgttgccattaatttttccgttgagcacgacaactaacctgttttttatcatttcaggaggaatgcggccatcgtaatacgtcgtgctgaacggtccattttggctaacaggatagttaccaaagttgcattccagtatttcaccaaccttagggctgaaattaatcgccacgagtaaacctctccttagtaaactctgaaaaagtaataacacaacgttacgacccgatattttctaagtctaatggattcacgatgaactccgatttcggtcttctctctctgatttaaacatccgcagccaaccggttagcggcttacacgcggtcacattcaaatgcgattctgctacaatcctccccccgttcgaagattgagcaatacacctatgcgtctaaaccccggccaacaacaagctgtcgaattcgttaccggcccctgcctggtgctggcgggcgcgggttccggtaaaactcgtgttatcaccaataaaatcgcccatctgatccgcggttgcggttatcaggcgcggcacattgcggcggtgacctttactaataaagcagcgcgcgagatgaaagagcgtgtagggcagacgctggggcgcaaagaggcgcgtgggctgatgatctccactttccatacgttggggctggatatcatcaaacgcgagtatgcggcgcttgggatgaaagcgaacttctcgttgtttgacgataccgatcagcttgctttgcttaaagagttgaccgaggggctgattgaagatgacaaagttctcctgcaacaactgatttcgaccatctctaactggaagaatgatctcaaaacaccgtcccaggcggcagcaagtgcgattggcgagcgggaccgtatttttgcccattgttatgggctgtatgatgcacacctgaaagcctgtaacgttctcgacttcgatgatctgattttattgccgacgttgctgctgcaagccaatgaagaagtccgcaagcgctggcagaacaaaattcgctatctgctggtggatgagtatcaggacaccaacaccagccagtatgagctggtgaaactgctggtgggcagccgcgcgcgctttaccgtggtgggtgacgatgaccagtcgatctactcctggcgcggtgcacgtccgcaaaacctggtgctgctgagtcaggattttccggcgctgaaggtgattaagcttgagcagaactatcgctcttccgggcgtattctgaaagcggcgaacatcctgatcgccaataacccgcacgtctttgaaaagcgtctgttctccgaactgggttatggcgcggagctaaaagtattaagcgcgaataacgaagaacatgaggctgagcgcgttactggcgagctgatcgcccatcacttcgtcaataaaacgcagtacaaagattacgccattctttatcgcggtaaccatcagtcgcgggtgtttgaaaaattcctgatgcaaaaccgcatcccgtacaaaatatctggtggtacgtcgtttttctctcgtcctgaaatcaaggacttgctggcttatctgcgcgtgctgactaacccggacgatgacagcgcatttctgcgtatcgttaacacgccgaagcgagagattggcccggctacgctgaaaaagctgggtgagtgggcgatgacgcgcaataaaagcatgtttaccgccagctttgatatgggcctgagtcagacgcttagcggacgtggttatgaagcattgacccgcttcactcactggttggcagaaatccagcgtctggcggagcgggagccgattgccgcggtgcgtgatctgatccatggcatggattatgaatcctggctgtacgaaacatcgcccagcccgaaagccgccgaaatgcgcatgaagaacgtcaaccaactgtttagctggatgacggagatgctggaaggcagtgaactggatgagccgatgacgctcacccaggtggtgacgcgctttactttgcgcgacatgatggagcgtggtgagagtgaagaagagctggatcaggtgcaactgatgactctccacgcgtcgaaagggctggagtttccttatgtctacatggtcggtatggaagaagggtttttgccgcaccagagcagcatcgatgaagataatatcgatgaggagcggcggctggcctatgtcggcattacccgcgcccagaaggaattgacctttacgctgtgtaaagaacgccgtcagtacggcgaactggtgcgcccggagccgagccgctttttgctggagctgccgcaggatgatctgatttgggaacaggagcgcaaagtggtcagcgccgaagaacggatgcagaaagggcaaagccatctggcgaatctgaaagcgatgatggcggcaaaacgagggaaataatcaaggccggaaaagatgcgtcagcatcgcatccggcacttactcattaatgcacttccagcggccagtggacatagctctgccactggctttcctgagcaataatctctttacccagcggatgttgggttagccaaccttgcggaagcgtcaaggtcaacagttcatggttagcctgtaatgtcatctctggcacgagatcgtcacggcgacggctggcaaaaatgatggccaggcgtagtaaacggcagagttgttctgcgagccgcggcggtacggcattttgctgatgcagcgatgagagatcgaccggattagtctggttgagcagtagcgtcgccagcaattttttctgtgcgggggtaaaaccgggaagatccagattacgcaccagataagcagcgtgttgcggcgcttgtttgaagtcaacgctcaggccgatttcatgaagctgacaggcgctgatgagcaaatcgcggcttattgcttcaagatgccattcgttttccacctgatcgaagaagttagccgcaactttggctacgcgctgtgcctgatcaatatcgatcataaagcggcgttgaatattacgcagcgtacggctgcgaatatcctgctcgacggccagatgcaacatgccgtagaccaggccttcacgcagcgcaccgcccgccagggtcatacactgaatattcagttcggtaaaaatggcgatcaggatcgccagaccactcgggaacactaacgcacgttccagcgtcagcccgtcaatctccagttcctccagccgaccgcaatgaatggctcgctgtttcaattgctgcaacttttccagggtaatgcgttcatccatcccctgtgccatcatgatttcctgtaacgcctgcacggtgccggaagcaccaacgcacactttccagccgtgataccgtaattcatcggcaaccggacgtaacacttcgcgtgccgctttttctgcagcatcaaaattttcctgccccagattacgatcggcaaaatagcgttccagccaggtgacgcagcccatcgacaggctgaacaacgaggtggtttgtgcacccgtgccggttaccagttcagtactggctccgcctatatccaccaccaggcgctgatcggcaccaccagtggtgtgagcaacgccctgataaatcagacgtgcttcctcttcaccgctgatcacctgtaccggacaaccgagaatttcctgcgctttggcaataaaatcacccgcattgacggcaaggcgtaacctcgccgtagcgacaacgcgaatttgcgagggaggaatatcttgcagacgttcagcaaacaggcgcaaacattgccaaccgcgctccattgcttcattggagagggcattttcgctattcaggccagcagccagacgcactttgcgttttattcgcgtcagcgtctggatgcttccagccacctcgcgcacaaccagcatatgaaaactattcgaaccgagatcaatggctgcatacagcgacgaggtggaacccatactcttcatccttcaatctgtctctgtgttggctgcattctttcacctgaatcacttactacagtaagctcatcgggattcattctcttgccatcttgatacagtttgaatgattttgagtatgacattttttatttaacctgaacgacgacgattacgcggagcgccagtacgacgcggaccattgcctgtgcgcgggcgcgtgaggcgcagcggttttggcagatcggtcatcaatgcgtccggattgtatttgcttaccggaattgagtgaccaatataggtctcaatagcaggcaaattcaatgcatactcttcacacgccaggctgatagagtgaccgcttgcgcctgcgcgacctgtacgaccaatacggtgaacgtaatcttcacagtcatcgggtaaatcgtagttaaagacgtgcgtcactgccggaatatgcaaaccacgcgcggcaacgtcggtggcaaccagaatatccagatcgccacgggtaaattcatcaagaatacgcagacgttttttctgcgcgacatcgcctgtcaataaaccgacacgatgaccatctgctgccaggtggccccagatctcttcacaacggtgtttggtgttggcgaaaataatcgctctgtctggccactcttcttcgatcagcgtttgcagcaaacgcattttttcttcgttagaagggtagaaaagctcttctttaatacggtggcccgttttctgttccggttccacttcaatatattcggcattgttcatctgctcgaacgccagttcacgtacccggtacgaaagcgtggcggagaacagcatgttgaggcgctggtttgcaggcggcatacggcggaacagccagcggatatctttaataaagcccagatcgtacatgcgatcggcttcgtccagtaccaccacctgaatggcaccgaggttaatgtggttctgcttggcgtagtcaattaaacgccccgtggtgccaatcagaatgtcaacgccgctttccagcactttcagctgtttgtcgtagccatcaccaccgtaagccagacccagcttcaggccagtagcttccgccagcggttctgcgtcggcatggatctgcacggcaagttcacgcgtcggtgccataattaaggcacgcggctgattcaccttgcgatcggcaatcgcaggatgagagagaagataatgaaacgttgacgtaagaaacgccatcgttttcccggtaccggtttgcgcctgcccggctacgtcacgacccgccagcgtcagcggaagggccagtgcctgaatgggcgtacagttatgaaacccttttttttcaagggcttctacaaccttcggatgcagggcgaagtcggaaaacttctgttctgttaaatgtgttttgctcatagtgtggtagaatatcagcttactattgctttacgaaagcgtatccggtgaaataaagtcaacctttagttggttaatgttacaccaacaacgaaaccaacacgccaggcttattcctgtggagttatatatgagcgataaaattattcacctgactgacgacagttttgacacggatgtactcaaagcggacggggcgatcctcgtcgatttctgggcagagtggtgcggtccgtgcaaaatgatcgccccgattctggatgaaatcgctgacgaatatcagggcaaactgaccgttgcaaaactgaacatcgatcaaaaccctggcactgcgccgaaatatggcatccgtggtatcccgactctgctgctgttcaaaaacggtgaagtggcggcaaccaaagtgggtgcactgtctaaaggtcagttgaaagagttcctcgacgctaacctggcgtaagggaatttcatgttcgggtgccccgtcgctaaaaactggacgcccggcgtgagtcatgctaacttagtgttgacttcgtattaaacataccttattaagtttgaatcttgtaatttccaacgcttcccgttttatcttaaatgcgaagtgaacagatttctggctcgtcactcaatccgtcttgtcgtttcagttctgcgtactctcctgtgaccaggcagcgaaaagacatgagtcgatgaccgtaaacaggcatggatgatcctgccataccattcacaacattaagttcgagatttaccccaagtttaagaactcacaccactatgaatcttaccgaattaaagaatacgccggtttctgagctgatcactctcggcgaaaatatggggctggaaaacctggctcgtatgcgtaagcaggacattatttttgccatcctgaagcagcacgcaaagagtggcgaagatatctttggtgatggcgtactggagatattgcaggatggatttggtttcctccgttccgcagacagctcctacctcgccggtcctgatgacatctacgtttcccctagccaaatccgccgtttcaacctccgcactggtgataccatctctggtaagattcgcccgccgaaagaaggtgaacgctattttgcgctgctgaaagttaacgaagttaacttcgacaaacctgaaaacgcccgcaacaaaatcctctttgagaacttaaccccgctgcacgcaaactctcgtctgcgtatggaacgtggtaacggttctactgaagatttaactgctcgcgtactggatctggcatcacctatcggtcgtggtcagcgtggtctgattgtggcaccgccgaaagccggtaaaaccatgctgctgcagaacattgctcagagcattgcttacaaccacccggattgtgtgctgatggttctgctgatcgacgaacgtccggaagaagtaaccgagatgcagcgtctggtaaaaggtgaagttgttgcttctacctttgacgaacccgcatctcgccacgttcaggttgcggaaatggtgatcgagaaggccaaacgcctggttgagcacaagaaagacgttatcattctgctcgactccatcactcgtctggcgcgcgcttacaacaccgttgttccggcgtcaggtaaagtgttgaccggtggtgtggatgccaacgccctgcatcgtccgaaacgcttctttggtgcggcgcgtaacgtggaagagggcggcagcctgaccattatcgcgacggcgcttatcgataccggttctaaaatggacgaagttatctacgaagagtttaaaggtacaggcaacatggaactgcacctctctcgtaagatcgctgaaaaacgcgtcttcccggctatcgactacaaccgttctggtacccgtaaagaagagctgctcacgactcaggaagaactgcagaaaatgtggatcctgcgcaaaatcattcacccgatgggcgaaatcgatgcaatggaattcctcattaataaactggcaatgaccaagaccaatgacgatttcttcgaaatgatgaaacgctcataaatttgtcttatgccaaaaacgccacgtgtttacgtggcgttttgcttttatatctgtaatcttaatgccgcgctggcgatgttaggaaaattcctggaatttgctggcatgttatgcaatttgcatatcaaatggttaatttttgcacaggactggtgggtttggaacggactttcccttctgaataaaggtcttcgtggttatacttctgctaataattttctctgagagcatgcattgtgaatttactgacagtgagtactgatctcatcagtatttttttattcacgacactgtttctgttttttgcccgtaaggtggcaaaaaaagtcggtttagtggataaaccaaacttccgcaaacgtcaccagggattgatacctctcgttggggggatttcggtttacgcagggatttgcttcacgttcggaattgtcgattactatattccgcatgcatctctctatctcgcttgtgccggtgtgcttgttttcattggcgcgctggatgaccgttttgatatcagcgtaaaaatccgtgccaccatacaggccgctgttggcattgttatgatggtgttcggcaagctttatctcagtagcctgggttatatctttggctcctgggagatggtgctcggaccgtttggttacttcctgacgctatttgccgtctgggcggccattaatgcgttcaacatggttgatggcattgatggcttgctgggcgggttgtcctgcgtctcgtttgcagcaatcggtatgattttgtggttcgacgggcaaaccagcctcgcaatctggtgctttgcgatgatcgccgccatcctgccatacatcatgcttaaccttggtatcctgggtcgccgctacaaagtctttatgggtgatgcgggcagtacgctgattggttttaccgttatctggatcctgctcgaaacgacccagggcaaaacccatcccatcagcccggttaccgctttgtggataatcgccattccgctaatggatatggtggcgattatgtaccgtcgcctgcgtaaaggcatgagcccattctctcctgaccgtcagcatattcaccatttgatcatgcgtgccgggtttacttcccgtcaggcgtttgtgctgattacccttgccgcagcactgctcgcttccattggcgtgctggcagaatattctcattttgtcccggagtgggtcatgctggtgctctttttgctagcattcttcctctatggatattgcattaagcgtgcctggaaagttgctcgctttattaagcgcgtaaaacgcagactgcgtagaaatcgtggtggcagccccaatttaaccaaataaatgaggatgtgatgacacaaccaatgcctgggaaaccggccgaagacgctgaaaatgaactggatattcgtgggttgtttcgtaccttgtgggctgggaagctatggattattggcatggggctggcgtttgcgttaatcgcgctggcgtatacgttttttgctcgtcaggagtggagctcgacggcgattaccgatcgtccaacggtgaatatgctggggggatattactcgcagcagcaatttttgcgtaacctggatgtccgttcaaacatggcttctgccgaccaaccatcggtcatggacgaagcctataaagagtttgttatgcaactggcctcgtgggatacccgcagagagttctggctgcaaaccgactattacaaacagcggatggtgggcaacagcaaagccgatgcggcgttgctggatgaaatgattaacaacatccagtttatccccggagactttacccgcgcggtcaatgacagcgtgaagcttattgccgaaaccgcgcctgacgctaataacctgttacgtcagtatgttgcttttgccagccagcgtgcagccagccatctgaatgatgagctgaaaggcgcatgggcggcgcgtaccatccagatgaaagctcaggtgaagcgtcaggaagaggtggcgaaagccatctacgaccgccggatgaacagcattgagcaggcgctgaaaattgctgagcagcataatatttcgcgcagtgcgacagatgtacctgccgaggaattacctgattcagaaatgttcctgcttgggcgtccaatgcttcaggctcgactggaaaatttacaggccgtcggtccggcctttgatctcgactatgatcagaatcgggccatgttaaacaccctgaatgttggtccaaccctggatccgcgttttcagacctatcgctatttgcgtacgccggaagaaccggtaaaacgcgatagcccacgtcgtgccttcctgatgattatgtggggcattgtcggggggctgatcggggctggtgtcgcattaacccgccgttgctcgaaatagcaacactgctgcggtgagcgcaaaggcgctcgccgcttattcgaagagaatcgatgtgaaagtactgactgtatttggtacgcgcccggaagccatcaagatggcgccgttggtgcatgcgttggcaaaagatcctttttttgaggctaaagtttgcgtcactgcgcagcatcgggagatgctcgatcaggtgctgaaactcttttccattgtacctgactacgatctcaacataatgcagccaggacagggcctgacagagataacctgtcggattctggaagggctaaaacctattcttgccgagttcaaaccagacgtcgtgctggttcacggcgatacgacgacgacgctggcaaccagcctggcggcgttttatcagcgtattcctgttggtcacgttgaggctggtctgcgcacgggcgatctctattcgccgtggccggaagaggctaaccgtacattgaccgggcatctggcgatgtatcacttctctccaaccgaaacttcccggcaaaacttgctgcgtgaaaacgttgcggatagccgaatcttcattaccggtaatacagtcattgatgcactgttatgggtgcgtgaccaggtgatgagcagcgacaagctgtcagaactggcggcaaattacccgtttatcgaccccgataaaaagatgattctggtgaccggtcacaggcgtgagagtttcggtcgtggctttgaagaaatctgccacgcgctggcagacatcgccaccacgcaccaggacatccagattgtctatccggtgcatctcaacccgaacgtcagagaaccggtcaatcgcattctggggcatgtgaaaaatgtcattctgatcgatccccaggagtatttaccgtttgtctggctgatgaaccacgcctggctgattttgaccgactcaggcggcattcaggaagaagcgccttcgctggggaaacctgtgctggtgatgcgcgataccactgagcgtccggaagcggtgacggcgggtacggtgcgtctggtaggcacggataagcagcgaattgtcgaggaagtgacgcgtcttttaaaagacgaaaacgaatatcaagctatgagccgcgcccataacccgtatggtgatggtcaggcatgctctcgcattctggaagcgttaaaaaataatcggatatcactatgagttttgcgaccatttctgttatcggactgggttatatcgggctgccaacggcagcagcgtttgcctcacggcaaaaacaggtaattggtgtcgatatcaaccaacatgcggttgataccatcaatcgtggcgaaatccatatcgtcgaacctgatttggcgagtgtagtaaaaactgccgtagaaggcggttttttacgagcgagcacgacgccagttgaagcggatcgctggctgattgctgtacccacgccgtttaagggcgatcatgagccagatatgacctacgttgaatcggctgctcgctccattgcgccagtgctgaaaaaaggcgcgctggtgatccttgaatccacctcgccggtggggtcaaccgagaagatggcagaatggttagcagagatgcgtccggatctcactttcccgcagcaggtgggcgagcaggcggacgtcaacattgcttactgcccggaacgcgtgttaccaggacaggtaatggtcgagctgattaaaaacgatcgcgtgattggtggtatgacgccggtttgttcggcccgcgccagcgaactgtacaaaattttcctcgaaggtgagtgtgtcgtcactaactcgcggacggcggaaatgtgtaagctcaccgaaaacagcttccgcgatgtgaatatcgcttttgctaatgaattgtcgctgatttgtgccgatcaggggattaacgtctgggaactgattcgcctggcgaatcgtcaccctcgcgttaatattcttcagcctggccctggcgtgggcggtcactgcattgctgttgatccgtggtttatcgtggcacagaacccccagcaggcgcggcttatccgtaccgcgcgcgaagtgaacgatcacaaaccgttctgggttatcgatcaggtgaaagcggcggtggctgattgcctggcggctaccgataaacgcgccagtgaactgaaaatcgcctgctttggtctggcgtttaaaccgaatattgatgacctgcgcgaaagcccggcgatggaaatcgctgaactgatcgcccagtggcatagcggcgaaactctggttgttgagcctaacatccaccagttgccgaaaaaactgaccgggctttgtactctggcgcagcttgacgaggcgctggcaacggcagacgtgctggtgatgctggtcgatcatagtcagttcaaagttatcaatggcgacaatgtccatcagcagtatgtcgtcgatgccaaaggagtctggcgctgatgagaaaaattctgataacaggtggtgccgggtttattggctcggcgctggtgcgttatatcatcaacgaaacgagcgacgcggtggtagtggtcgataagctgacctacgccggaaacctgatgtcgctggcaccggtcgcgcaaagcgagcgctttgcctttgagaaagttgatatctgcgatcgggcagaactggcacgcgtattcactgagcatcagccagactgtgtcatgcatctggcagccgaaagccatgttgaccgttctattgacggcccggcagcgtttattgaaaccaacattgtcgggacttatacattgcttgaagcggcgcgggcttactggaatgcgctgacggaagataaaaaatcagcgttccgttttcatcatatctccactgacgaagtatatggtgacctgcactcgacggatgatttcttcaccgaaaccacgccgtatgcgccgagcagcccttattccgcgtcaaaagccagcagcgaccatctggtgcgcgcctggctgcggacctatggtctgccgacgcttatcaccaactgctcgaataactacggcccttaccactttccggaaaaactgatcccgctgatgatcctcaacgcgctggcgggtaaatcgctgccggtatatggcaacgggcagcaaatccgtgactggctgtatgtggaagatcacgcccgcgcgctgtattgcgtggcgaccaccgggaaagtcggtgaaacctataatattggtggtcacaacgagcgtaagaatctcgatgttgtggaaaccatttgcgagctgctggaagaactggctccgaacaagccgcacggcgtggcgcactatcgtgacctgatcacctttgtcgctgaccgtccggggcatgatctgcgttatgccattgatgcttcgaaaattgcccgtgaacttggctgcgtgccgcaggaaacctttgaaagtggaatgcgtaaaacggttcagtggtatctggctaatgaaagctggtggaagcaggtgcaggacggcagctatcagggcgagcgtttaggtctgaaaggctaattttcagcggaggcaaacatgaaaggtattatcctggcgggcggttccggcacccgattgcatccgattacgcgcggcgtatcgaagcaactgttgccgatttacgataagccaatgatttactatccgctgtcggtgctgatgctggccggtatccgcgaaattctcatcatcactacgccggaagataaaggttatttccagcgcctgctgggcgatggtagtgagttcggtatccagctggaatatgccgaacagcccagcccggacggtctggcgcaggcctttatcatcggtgaaaccttccttaatggtgaaccttcttgtctggtgctgggcgataacatcttcttcggtcagggcttcagtccgaagctgcgtcatgttgcggcgcgcaccgaaggggcgacggtttttggctatcaggtgatggacccggaacgctttggcgtggtggagtttgacgacaatttccgcgctatctcgctggaagaaaagccaaaacagccgaagtcaaactgggcggtgaccgggctttatttctacgacagtaaagtcgtggagtacgcaaagcaggtgaagccgtcggagcgtggtgaactggagattacctccatcaaccagatgtacctcgaggcgggcaacctgaccgttgaactgctcgggcgcggatttgcctggctggataccggcactcacgacagcctgattgaagccagcacctttgtacagacggtggaaaaacgccagggctttaagattgcctgcctggaagagattgcctggcgtaacggctggctcgatgacgagggtgtgaagcgtgctgccagttcattagcgaaaactggctacggccaatatctgctggagttacttcgtgcccgtccgcgccagtattgagccactaacctgggaaaacgccttctttggtgttaacagcgccatcgtgcgcattacgtctgaagcaccgctcctgacgccagacgcgttagcgccgtggtcacgggtgcaggccaaaattgcggcatcaaatacgggtgaactggatgccctgcaacagctgggattctccctggtagaaggtgaagttgatttggcgctacccgtgaacaatgccagtgatagcggtgctgtagtggcacaagagaccgatattcccgcattacgtcagttagccagcgccgcatttgcgcaaagccgttttcgtgcgccgtggtatgcgcctgacgccagcagtcgcttttatgcacagtggattgaaaatgccgtgcgcggcacctttgatcatcaatgtctgattttacgtgcggcgtccggcgatattcgcggctatgtctctttacgggaactcaatgcgacagatgcgcgaattggcctgctggctggacgcggtgcaggtgctgagctgatgcaaacggcgctaaactgggcgtatcgtcgcggtaaaacaactttgcgggtggcgacccaaatgggcaacaccgccgcgcttaaacgatacatacaaagtggtgcgaatgtagaaagcaccgcgtactggttatacaggtgatcacatgattccatttaacgcaccgccggtggtgggaaccgaactcgactatatgcagtcggcaatgggtagcggcaaactgtgtggcgatggcggttttacccgtcgctgccagcagtggctggagcaacgttttggcagcgccaaagtgttactgacgccgtcctgcaccgcttcgctggagatggcggcgctgctgctcgatatccagcctggcgatgaagtgatcatgccgagctacacctttgtctccaccgccaatgcctttgtgctgcgtggcgcaaaaatcgtttttgtggatgttcgcccggacaccatgaacatcgacgaaacgctgattgaagcggcgatcaccgacaaaacgcgcgttatcgtgccggtccattacgcgggtgtggcctgcgaaatggacaccattatggcgttggcgaaaaagcataatttgtttgtggtagaagatgccgctcagggcgtgatgtccacttacaaagggcgtgcactgggaaccattggtcatattggctgctttagcttccatgaaaccaaaaactacacggcgggcggtgaaggcggcgcgacgctgattaacgataaagcgttaatcgaacgagccgagatcatccgtgaaaagggcactaaccgcagccagttcttccgtggtcaggtcgataaatatacctggcgcgatattggctccagctatttgatgtccgatctgcaagctgcatacctgtgggcgcaactggaagcagcggatcgtatcaaccagcaacgtctggcgctgtggcaaaactactacgatgcgttagcgcctctggcgaaagccgggcgtatcgagctgccgtcgattcccgatggctgcgtgcagaacgcgcatatgttctacattaaactgcgggatattgatgaccggagcgcgttgattaactttctgaaagaagcggaaatcatggcggtgtttcattacattccgctgcacggttgccctgcgggggaacactttggtgagttccacggtgaagatcgctacaccaccaaagagagcgagcgcctgctgcgcctgccgctgttctacaacctgtcgcccgtcaatcagcgtacggtaattgcgactttgttgaactacttttcctgatatgtcgttggcaaaagcgtccttgtggacggcggccagtacactggtcaagattggtgccgggttactggtcggtaagttgctggcggtgtcatttggtccggcggggcttgggctggcggcaaatttccgccagttgattaccgtgctcggcgtgcttgccggggctggcatctttaacggtgtaaccaaatacgttgcccagtaccatgataatccgcaacagctgcgccgcgtggtcggcacttcatcagcgatggtacttggtttctctacgctgatggcgctggtttttgtgctggcagctgcgccaatcagccagggattgtttggtaataccgactatcaggggctggtgcgtttagtggcgctggtgcaaatggggatcgcctggggcaacctgttactggcgctgatgaaaggctttcgcgatgccgcaggtaatgcgttatcgctgattgtcggcagcttgattggcgttctcgcgtactacgtcagttaccgtttgggcggttatgaaggggcgttgctgggtctggcgctgattcccgcgctggtggtaattcctgccgccatcatgttgatcaaacgtggtgtcatcccgttaagctatctgaaacccagctgggataacggtctggcagggcagttgagcaaatttacgctcatggcgttgattacgtcggtgaccttgcctgttgcttacatcatgatgcgtaaactgctggcggcgcagtatagctgggatgaggtggggatctggcaaggggtgagcagtatttccgatgcctacctgcaatttattacggcatcgttcagcgtatatttgctgcccacgttgtcgcggctaacggaaaagcgcgatatcacccgggaagtggttaaatcgctgaaattcgtcttaccggcagtggcggcggcgagttttaccgtctggctgctgcgtgattttgctatctggctgctgttgtcgaataaatttaccgctatgcgcgatctctttgcctggcagttagtgggtgatgtgttaaaagtgggcgcttatgtctttggttatctggtgatcgccaaagcgtcactgcggttttatattctggcggaagtcagccagttcactttattgatggtatttgcccactggctaatccctgcgcatggtgcactgggcgcggcgcaggcatatatggcaacttatatcgtctatttttctctttgttgtggcgtgtttttactctggcgtaggcgggcatgactgtactgattcacgtactgggatcggatatccctcaccataaccgaaccgttttgcggtttttcaatgacgcgctggccgcgacgagcgagcacgcgcgcgagtttatggttgttggcaaggacgacggcttaagtgatagctgtccggcgctttctgtgcaatttttcccctgggaaaaaatcgctggcggaagcggtcatcgcgaaagcaaaagctaaccgtcagcagcgttttttcttccacggtcagttcaatcccacactgtggctggctctgctgagtggtggcattaagcccagccagtttttctggcatatctggggggcagacctgtatgagctttccagtggcttgagatataagcttttttacccactacgtcgcctggcgcaaaagcgagtcggctgtgtatttgccacccgcggcgatttgagcttttttgccaaaacgcacccaaaggtgcggggcgaactgctgttcttcccgacgcggatggacccttcgctcaatacgatggcgaacgatcggcaacgtgaagggaaaatgaccattctggtggggaactccggcgaccgcagcaatgagcatattgctgccttgcgcgccgttcatcagcaatttggcgatacggtaaaagtggtggtgccgatgggatatccgcctaataacgaagcgtacattgaggaagttcgtcaggcggggctggagttattcagcgaagaaaatctacaaattctgagcgaaaaactggaatttgacgcctatctggcgctacttcgtcagtgcgatcttggttactttatttttgcccgccagcagggcattggtacgctgtgcttactgattcaggcgggcattccttgtgtgcttaaccgggaaaatccgttctggcaggatatgacggaacaacatttgccggtgctgtttactaccgacgatctcaacgaggatattgtgcgtgaagcgcagcgccagttggcgtcggtggataaaaacaccattgccttctttagccctaactatctacaaggctggcagcgggcgttggcgattgccgccagggaggtcgcatgagtctgctgcaattcagtggcctgtttgttgtctggctgctctgcacgctgtttattgccacgctgacctggtttgagtttcgccgtgtgcgctttaacttcaatgtcttcttttcattgctgtttttgctcacctttttcttcggcttcccgctgaccagcgtgctggtatttcgctttgatgttggtgtcgcgccgccagaaatcttgttgcaggcgttgctttctgcgggctgcttctacgcggtttactatgtcacctacaaaacccgcctacgcaaacgcgttgctgatgtaccgcgccgtccgctgtttaccatgaaccgcgtggagaccaatcttacgtgggtgatcctgatgggtatcgcgctggtaagcgtcggcatcttcttcatgcacaacggctttttgctgttccggcttaactcctacagtcagatcttttccagtgaagtctccggcgtggcgttaaaacgcttcttttactttttcatcccggcgatgctggtggtctactttctgcgccaggacagcaaagcgtggctgtttttcctcgtcagcacggtcgcctttggcttgctgacttatatgattgtcggcggcactcgcgccaatatcatcatcgcattcgctatcttcctgtttattggcattattcgcggctggatttcgttgtggatgctggcggcggcgggcgtgctggggattgttggcatgttctggctggcactaaaacgctatggaatgaatgtgagcggcgatgaagcgttctatacgtttctctatctcactcgcgacaccttctcgccgtgggagaatctggcgttgctgttgcagaactacgacaacatcgacttccagggcctggctccaattgtccgcgatttctatgtctttatcccttcctggctgtggccgggtcgcccgagtatggtgctgaactcagccaactactttacctgggaagtgctgaataaccactccggactggcgatctcgcctacgcttataggctcactggtggtgatgggcggcgcgttgttcatcccgctcggggcgatcgtggttggtctgatcatcaaatggttcgactggctgtatgagctgggcaaccgcgagcctaatcgctataaagctgcgatattgcacagtttctgctttggggcgatcttcaatatgatcgtgctggcgcgtgaagggctggattcgtttgtctcacgcgtggtcttttttatcgtggtcttcggcgcatgtctgatgatcgcaaaactgttgtactggctttttgaaagcgccggactcattcataaacgtacaaaatcatcgctccggacgcaggttgaaggataacaatgaataacaacaccacggcaccaacctatacgctgcgtggcttacagttgattggttggcgtgatatgcagcacgccctcgattatctgtttgctgacgggcagcttaagcagggaacgctggttgccattaatgctgaaaaaatgctgactattgaagataacgccgaggtcagggagttaattaacgctgccgaatttaaatatgcggatggcatcagcgttgtacgttcagtacgtaaaaagtacccgcaggcgcaggtttcccgcgttgccggtgccgatctctgggaagagctgatggcgcgcgcaggcaaagaagggacgccggtatttcttgtgggcggtaaacctgaagtgctggcgcaaactgaagctaaactgcgcaaccagtggaatgtgaatatcgttggcagtcaggatggttattttaaacccgagcagcgtcaggcgctgtttgaacgcattcatgccagcggtgcgcaaatcgtcaccgttgcgatgggatcgccaaagcaggagatcatcatgcgcgactgccgtctggtacatccagatgcgctgtatatgggcgttggcgggacttacgatgttttcaccggtcacgtaaaacgcgcaccgaaaatctggcaaacgctggggctggagtggctctaccgcctgctttcgcagccgagccgcattaagcgtcagcttcgtttgctgcgttatttacgctggcactacaccggcaacctatgattttcctctctttgtaaagcgacggagtggtcactccgtcgcctgtctgcttttttattacacaaagcattcaaatttttaatgctttatttgccatttctcctgaattacgaaaacatttgcaacactcgatgtacccataacgataaccggtaacaccggaaagcatgcaaacacaacacgaggatttatggcagataacaaaccagagctacagcgtgggctggaagctcgacatatcgaactcatcgccctggggggcaccattggcgtcggcctgtttatgggggccgccagtaccctgaaatgggccgggccatccgtattgttggcctatatcatcgccgggctgttcgtctttttcatcatgcgttcaatgggcgaaatgttgtccctcgaaccggttaccggttcgttcgccgtttatgcgcatcgttatatgagcccgttctttggctatctcaccgcctggtcttactggtttatgtggatggcggtggggatctctgaaatcaccgccattggcgtttatgtccagttctggttcccggagatggcgcagtggatacccgcattgatcgcagtggcgctggtggcgttggcgaatctggcggcggtgcggttgtacggcgaaatcgagttctggttcgcgatgatcaaagtcaccacgattatcgtgatgattgtcattggcctgggcgtgattttctttggctttggcaatggcgggcagtcgattggttttagcaatctcacagagcatggcggtttctttgcgggtggctggaaagggttcctgaccgctctgtgtattgtggtggcgtcctaccagggcgtggagctgattggcattactgccggtgaagcgaagaatccgcaggtgacgctgcgcagtgccgtaggcaaggtgctgtggcggatcctgattttctacgtaggcgcgattttcgttatcgtcaccatcttcccgtggaatgaaataggcagcaacggcagcccgttcgtactgacttttgccaaaatcggtattaccgcagcggcgggcattatcaactttgtggtgctgacggctgcgctctctggctgtaacagcggcatgtacagttgcggacgtatgctctacgcactggcgaaaaaccgtcagttaccggcggcaatggcgaaagtttcccgtcacggcgtaccggttgcgggtgtggcagtatctattgctattctgctaattgctcatgcctggaactacatcattcccaatccgcagcgtgtgtttgtctacgtctacagtgccagcgtgcttccggggatggtgccatggtttgtgatattgataagccagctgcgttttcggcgtgcacataaagcggcgattgccagccatccgttccgctcaatcctgttcccgtgggccaattacgtaacaatggcattcctgatttgcgttttgatcggcatgtactttaatgaagatacgcgtatgtcgctgtttgttggcatcatctttatgctggcggtgacggcgatttataaagtttttggccttaatcgccacgggaaagcgcataaactggaggaataagcagcaaaacgcacaaaccgtaaccaaacgcgcaatttatttaaaaagggactagacagaggggtgggaagtccgtattatccacccccgcaacggcgctaagcgcccgtagctcagctggatagagcgctgccctccggaggcagaggtctcaggttcgaatcctgtcgggcgcgccatttagtcccggcgcttgagctgcggtggtagtaataccgcgtaacaagatttgtagtggtggctatagctcagttggtagagccctggattgtgattccagttgtcgtgggttcgaatcccattagccaccccattattagaagttgtgacaatgcgaaggtggcggaattggtagacgcgctagcttcaggtgttagtgtccttacggacgtgggggttcaagtcccccccctcgcaccacgactttaaagaattgaactaaaaattcaaaaagcagtatttcggcgagtagcgcagcttggtagcgcaactggtttgggaccagtgggtcggaggttcgaatcctctctcgccgaccaattttgaaccccgcttcggcggggttttttgttttctgtgcatttcgtcaccctcccttcgcaataaacgcccgtaataactcattgccccacggtatgatttcgcccttaacgtattgaaggatgacttcaggcaaggagcgaccatgctgcaacaggttccaacgcgtgcttttcatgtgatggcgaaaccgagcggttccgattgtaatctgaactgtgactactgtttttatctcgaaaaacaatccctttaccgcgaaaagccagtcacgcatatggacgatgacacgctggaagcgtatgtccgtcactatatcgctgccagcgaaccgcaaaacgaagtggcttttacctggcagggcggcgaaccaacgctactcgggctggcgttttaccgccgtgccgtagcgctacaggcgaaatatggtgctggcaggaagataagtaacagcttccagactaacggcgtgctgctggatgacgaatggtggccgtttctcgcggagcatcattttcttgttggtttatcgctggatggcccgcctgagatccacaatcaatatcgcgtgactaaaggtggcagacccacgcataagctggtgatgcgtgccctgacgctcctgcaaaaacatcatgtcgactataacgtgctggtctgcgttaatcgcaccagcgcgcagcaaccgttgcaggtatatgattttttgtgcgatgcgggagtcgaattcatccagtttattccggtggtcgagcgcctggctgatgaaacaactgcccgcgatggacttaagttacatgcgcctggtgatattcagggtgagctaacggaatggtcggtgcgccccgaggagttcggtgagtttctggtggcgatattcgaccactggatcaaacgcgacgtcggcaagattttcgtgatgaatatcgaatgggcgtttgccaattttgtcggtgcgccgggtgcggtttgccatcatcagccaacctgtgggcgctcggtgattgttgagcacaacggcgacgtttacgcctgtgatcactatgtttatccgcaatatcggctggggaatatgcaccagcaaacaattgcagaaatgatcgattccccgcaacagcaggcgtttggtgaagataaatttaagcagttaccggcgcagtgtcgcagttgtaacgtgttaaaagcgtgctggggaggctgcccgaaacaccgcttcatgctcgatgccagcggcaaaccgggactgaattatttgtgtgccgggtatcagcgttatttccgccatctaccgccatatcttaaagcaatggctgatttgctggcgcacggtcgcccggccagcgacattatgcatgcgcatttgctggtggtgagtaagtagaaatcggcggccgcctgcggttgattgccggatgcggcgtaaacgccttatccggcctacatgatcgtgcaaattcaataaattgcagcgttctgtaggctggataagatgcgtcagcatcgcatccggcaaaggcagatctcagcgatagcgccggcttagtcagatttaatctgcgcgcgtggtggatattttttcaggatctccatatacgcgtgcatttcggtctgtagcggtacacccatcggaatatggcgcacgccgatggagtcgctttcctgcggatcggtgtagaggttaaacaccgacgatcccgccgtttgcattactgtgccggtgaatccaccctgatatccgctctgggtataagcgtaaggttgctgaatcaggacgtgatacttgaactcatccatacgcacagcagcgagtttaccgttgaggaagtagtgctcggccttacggttagactgaccatttgttcccaggaagaaggatgtctggtccacaccatcgataaaggtggttttcggcactaaattcgccactttcgctccaggatgccctgccagatccagcgcggtagggaagagatctgccagatcgacaataccgtcagatttacgcggttggatcatccctttccagtaaacgaaagtcggtacgcgaacgccgccttcccaggtcgaacctttcgcaccacggaacggggtgcgtccgtgcggcggtacttcggcttccggtccgttatcggaggtaaagacgatcagcgtgttatcaagctgaccgtttttctccagtgttttatacagattagcgaacacatcgttcatctccaccatgcagtcgccatacgaggtgcgtgccggagagctacccgcatatttcgcatttgggtagttatcgaagtggcagccacgagtgccgtagtagaggaagaatggtttatcgctcttcgccatcttgtcgaggaacttaacgccatagtccatccagcgttgatccagatcttccatatatttcggcgtaatgtcggcaatggcctgttgttcgccgccgcgcaccgcatgaacgtcatctttgctgaacggtaattgcttgatgtattcagaacggtccggactcagggccacttccggattgacgtgaacgtcgcgccattcggtgtacatatcagacaccgagttaaagccacggaaatcatcaaagccaacgttctgcggctgcgactctttgttttcccccatatgccattttccgatggcctgagtgacgtagccctgatcgtgcagcaactgcggcagcgtggttaacccttgcagcccgcccggttgcccgtacattggcggcatcagaatgccgtggtggatggagtattgtccggtgagaatggtggcgcgggttggggaagagcttggttgagaatacgccgaagttaaaatcagcccctggctggcaacggcgtcgatatctggtgtagggttacccaccgccacgccgccaccgttaaaaccgacgtccatccagcccacatcgtccagcaagaaaacaaccacattcggtttcttaccggtttttttctcaagttctgccagcttctgctgggtttctttatcctgcgccggatgctgcattactggcatcatattgtcggcaatagtggtcgccggtttaaccagatactggtttgggtgatcgtatccggcaaagcctttgcgtgcggtggcagttgacggggtatctgctgcgctggccatgagaggaagagcggcggcgacagcaacaacaagacgtttgggtgaaaacgaaaattccatgcaaaatgctccggtttcatgtcatcaaaatgatgacgtaattaagcattgataattgagatccctctccctgacaggatgattacataaataatagtgacaaaaataaattatttatttatccagaaaatgaattggaaaatcaggagagcgttttcaatcctacctctggcgcagttgatatgtaaggcaggtttattatatcgcgttgattattgatgctgtttttagttttaacggcaattaatatatgtgttattaattgaatgaattttatcattcataataagtatgtgtaggatcaagctcaggttaaatattcactcaggaagttattactcaggaagcaaagaggattacagaattatctcataacaagtgttaagggatgttatttcccgattctctgtggcataataaacgagtagatgctcattccatctcttatgttcgccttagtgcctcataaactccggaatgacgcagagccgtttacggtgcttatcgtccactgacagatgtcgcttatgcctcatcagacaccatggacacaacgttgagtgaagcacccacttgttgtcatacagacctgttttaacgcctgctccgtaataagagcaggcgtttttttatgtatcaggaaggccccggaggtgcttgcctccgggtgagaaggaactactgtggcgggttattctgcaacgttaacatcaaaccgtcgcgacgcatagctgcagcttcttccggcttgtgcagtctgtccagcgcgtcggcaagccatgcgtaatcgtaggcgtccggacgttgtttcagcgctgcgcggaaggcgagcgatgcttcctgccattctccgtgcttcatcagtgactggcccagtgtgctccacaacagcgggcgatcgccgacgtttttgatttgctggcgcagcactttttccagctgttccggattgtttgttttcagtcgaggaatcggcagcagtaggcgatcgtcgtactggcgtttcaggccatcgatgataatttgctgggcagtatcatgatcgtcacattcaataagatgttccgccattgccacctgcaacgctacctgatgacgcgttttccggctttggtttttccaccagttacgcaaaccttcgctaccgttatcggcacgcgcctgatccatcaggccaatccatgcctgttgttccagcattgcacgatgttcttcatcaccaacatgggctttcgccattgatgggataatatccagcagcgaactccatgcacctgtgcggatatacgcctgttccgccagacgtaatacttccggatggcgtggcgtaacttccagcagcttatccacgccgtggcgtgcagcatggttttcattacgggccagttgcagacgtacgcgggtgatttctaccggaatggtgtcgttgccggccagctccgctgcgcgttccagatgttggttggcgcgtgcttcatcaccacgttgttgcgcggcttcggcagccagtagatagttcaccaccggttgttccgcgtgatcggcatttttcgccatcagcttttcaacttgctgataatcgccttccgccagtttcagcagcgcctgttcggtctgcttacgtgcacggcgacgcttacgtccgacaaaccacccacgggtgtgcgcgccagtgcggaagatccgccgcagtagccactcaatggcaaacagcactaccatcgccagaatcaatatgatcgccaggcccgtgacgctggtttcgatattgtagttgtcggtctggatcagcacataaccctgatggccggcaatcatcgggccaaccacgatccccgcaatcagcaacacaaagagcaataacacttttagcatggttattctccttgcggcgcggctgccggagtatcagcttgcggtgcaggtgcaggtttagcttccgttgtccccgctgccggttgtgccagcaggttacgcacgcgagtctgcatcagtttttccagcatcgcctggctttgcagggtttccggaagatccatcgagatattttgctggcttaactggtccacctcgtcgaggaacgctttggtggtggcatcatcagtatcgtagtaagcacgtacccaggtggagacgttctccagcgcctggcgataagtctcttcctggtgacgcggtacagcttgtgctgcgaccagcaggcgagagcgaatattttcgcgcagatagatatcctgatttggcgctaacagcggtacggcggtgtcatcacgacggcgaatcgtaatgaagttgtccataaagttctgccagcttttttgcagattgatacgccattcgctgatggaactggaaagctcttcaccgtctgaatccatcggcgaaccatcgctgtcattatcggccagacgcaggttatctacctgatttgaaagctgattaagcttaaggatgatgccgtcataatccacctgcgatactgcagaaaggctggcgatatcatcggtaattgcccgacgaacggtaatcagactcgggtcattcatatccgccaggctggcgtctgcacttttcagcaacgctgcagcggtcgtgacgtcctgatcgctccacagcttccgtccggcgagtttcaccagaaaatcggcctgagccagcagccaggttttagcatcgctgccggaaatggtggcgaccttttgttggacttcatccaactgttttgccagcgtttcttgctgacgattcgcctgcttaagttgtgcagcttgttgcttaataatgccttccagctcggctttttggctctcctgggctttttgcaatgccgtcagttggttagccagggcatcgctggtggcggtctgattgacggcctgttgtttaccccagccatacaaaccgatgcccgccgccagagcaatagcgatagccaccgcgctgagaatcaatgcggtattgttcttactctttttttctgttgcgacaggttgtgacgtggtgtccacggcctccctggtctcttcaaccacggcggaggttttttcttgttccgtcattatggcttcctgttatgagagttattgtaatgcccgtaaaagcgcatcgttgtcagcgttatcggcgaccttaatgtcttgccagcccagttcccgggcgagtttcgccaaacgctcactgacgaccaatagtcgacagtgtagtaaccagtgctcacgataccattgtgggatcagcgaccagagttgctgcaacatttcaccgctggtaacaacgaccatcgtcacctcgcgggcttgccagcgcatcgcttcttctgcaccatcgtaatggattgcgcatcgttgataacattcacaaaaagtgacctcagcaccgcgcgccgtcagggtatccccaattagctcacgaccaccattgccacgtaatatcagcgcacgtttgcccgcaatattttgtaattcaggtaattgtagcaagacttcgctgatttcccgatcctgcgggtagagaatcttctgtccacttacggtatgtagtgccagtgcggtggtgcgtccaatggcgaaataatcaggtagtcggggccatttacgatcttgctgatgcagctgtgattgggcaaaagcaaccgcgtgttgcgagagggcaaacaacagatcgctctcccccagcgctgccagttgatcagcaagttgcggtaattgttgacccggagaaaactcaatcagcggaaaatgccaggccacctgccccagtgtgcgcagacggctcactaactcttctccagcgggagacgggcgggtgacaaggatactcatgccggggcgtctccgttatagacttcagcgaggatctcgcgcgcgccgttattcagtagctcttctgccagcgaaatccccatttgttcggcatcttgcggcgcaccgcggcgttcaccgcgaataatctgcgaaccgtccggccggccgaccagcgcacgcagccagatttcgccatcaataagctcggcgtagctaccaattggcacctgacatccgccttcgagacgggtattcatggcgcgttctgcggtaacgcgcagtgcagtttcgtggtgattcagcgcggcaagcagctcgcgagtgcgtgaatcatcaaggcggcattcaatacccaccgcaccttgtcctaccgccggaagagaaatctcgggtggcaagccggcgcgaatacgtgactccagacctaaacgttttagtccggctacggcaagaatgatggcatcgtattcgccgttatccagtttgctcaggcgagtgccgacgttgccgcgcagggagcggataatcagatccggacggcgttcagccagttggcactggcgacgtaaactggacgtcccgacgatactgcctgccggtaacgcatccagactgtcatagttattggacacaaaggcatcgcgaggatcttcacgctcacaaatagtgaccagtcccagaccttgcgggaattcaaccggcacatctttcattgagtgtacggcgatatcggcgcgattttcgaggagcgcgacttccagctcttttacaaataagccttttccgcctactttcgccagcggcgtatcaagaatcacatcgccgcgcgtcaccatcggtaccagttcaacgaccaggcccggatggctcgccatcaacttgtctttgacatagtgtgcctgccagagtgcaagtgggctttggcgtgtggcaattcttaaaacattgtctaacatgcttgttaccgtcattatcatccgtggtccatcctaacatccttgccagagtgatgtcagtgttgtggtgaaacgtagacgcctgcgcaaaccgtaaaatgaggtctggcagtggatcctgacaggcgtttcacgccgttgtaataaggaatttacagagaataaacggtgctacacttgtatgtagcgcatctttctttacggtcaatcagcaaggtgttaaattgatcacgttttagaccattttttcgtcgtgaaactaaaaaaaccaggcgcgaaaagtggtaacggttacctttgacatacgaaatatcccgaatgccgcgtgttaccgttgatgttggcggaatcacagtcatgacgggtagcaaatcaggcgatacgtcttgtacctctatattgagactctgaaacagagactggatgccataaatcaattgcgtgtggatcgcgcgcttgctgctatggggcctgcattccaacaggtctacagtctactgccgacattgttgcactatcaccatccgctaatgccgggttaccttgatggtaacgttcccaaaggcatttgcctttacacgcctgatgaaactcaacgccactacctgaacgagcttgaactgtatcgtggaatgtcagtacaggatccgccgaaaggtgagcttccaattactggtgtatacaccatgggcagcacctcgtccgtagggcaaagttgttcctctgacctggatatctgggtctgtcatcaatcctggctcgatagcgaagagcgccaattgctacaacgtaaatgtagcctgctggaaaactgggccgcctcgctgggtgtggaagtcagcttcttcctgattgatgaaaaccgcttccgtcataatgaaagcggcagcctggggggcgaagattgtggctccacccagcatatactgctgcttgacgaattttatcgtaccgccgtgcgtctcgccggtaagcgtattctgtggaatatggtgccgtgcgacgaagaagagcattacgacgactatgtgatgacgctttacgcgcagggcgtgctgacgccaaatgaatggctggatctcggtggcttaagctcgctttctgctgaagagtactttggtgccagcctttggcagctctacaagagtatcgattccccatacaaagcggtactgaaaacactgctgctggaagcctattcctgggaatacccgaacccacgtctgctggcgaaagatatcaaacagcgtttgcacgacggcgagattgtatcgtttggtctcgatccatactgcatgatgctggagcgtgttactgaatacctgacggcgattgaagattttacccgtctggatttagtacgtcgctgcttctatttaaaagtgtgcgaaaagctcagccgtgaacgcgcctgcgtaggctggcgtcgcgcagtgttgagccagttagtgagcgagtggggttgggacgaagctcgtctggcaatgctcgataaccgcgctaactggaagattgatcaggtgcgtgaggcgcacaacgagttgctcgacgcgatgatgcagagctaccgtaatctgatccgctttgcgcgtcgcaataaccttagcgtctccgccagtccgcaggatatcggcgtgctgacgcgtaagctgtatgccgcgtttgaagcattaccaggtaaagtgacgctggtaaacccgcagatttcacccgatctctcggaaccgaatctgacctttatttatgtgccgccgggccgggctaaccgttcaggttggtatctgtataaccgcgcgccaaatattgagtcgatcatcagccatcagccgctggaatataaccgttacctgaataaactggtggcgtgggcatggtttaacggcctgctgacctcgcgcacccgtttgtatattaaaggtaacggcattgtcgatttgcctaagttgcaggagatggtcgccgacgtgtcgcaccatttcccgctgcgcttacctgcaccgacaccgaaggcgctctacagcccgtgtgagatccgccatctggcgattatcgttaacctggaatatgacccgacagcggcgttccgcaatcaggtggtgcatttcgatttccgtaagctggatgtcttcagctttggcgagaatcaaaattgcctggtaggtagcgttgacctgctgtaccgcaactcgtggaacgaagtgcgtacgctgcacttcaacggcgagcaatcgatgatcgaagccctgaaaactattctcggcaaaatgcatcaggacgccgcaccgccagatagcgtggaagtcttctgttatagccagcatctgcgcggcttaattcgtactcgcgtgcagcaactggtttctgagtgtattgaattgcgtctttccagcacccgccaggaaaccgggcgtttcaaggcgctgcgcgtttctggtcaaacctgggggttgttcttcgaacgcctgaatgtatcggtacagaaactggaaaacgccatcgagttttatggcgcgatttcgcataacaaactgcacggcctgtcagtgcaggttgaaaccaatcacgtcaaattaccggcggtggtggacggctttgccagcgaagggatcatccagttctttttcgaagaaacgcaagacgagaatggctttaatatctacattctcgacgaaagcaaccgggttgaggtatatcaccactgcgaaggcagcaaagaggagctggtacgtgacgtcagtcgcttctactcgtcatcgcatgaccgttttacctacggctcaagcttcatcaacttcaacctgccgcagttctatcagattgtgaaggttgatggtcgtgaacaggtgattccgttccgcacaaaatctatcggtaacatgccgcctgccaatcaggatcacgatacgccgctattacagcaatatttttcgtgatgaacgtgccggaaagcgaggcttatccggcatgcaatcttagcggaaactgactgtttcacccgcctgctgcgtcgccgcctgttccagcaaatcccagaaggtttcgccgctgcgatcacaaatccactcatcgcctttcaggtcaaaatggtagccgccctgtttggttgccagccatacctggtgcagcggctcctggcggttgataatgattttgctgccattctcaaaggtaatggtcagtacgccgccgttgatttcgcagtcgatatcgctgtcgccatcccagtcgtccaggcgttcttcaatggtcagccagagttgatcagccaggcgatgaaattcactgtcgttcattgttgtatcctgtttttaagtgatggcggcagtatagcggcatggggtcagggcttcaaagtttgcacctctgcggctgcgttccggcacgattcatccgtcaccggaataatgatgtctctgtgtagcgaaagatttgtctcttcattagggcgcagttacaccacgtctttccctgtttctggtaaacattatgatcaggtttaccgagcgagcatcctcacgctgacggaactaaaaaagacaacaaacaaaccacattgcgatagtgcataaagccatcctggcgcgaggtgccgatcacgaaactaccagcaaaacataaatccccacgagtaagcgttatactcgcagcatttcctcacttttcagacttcataaagagtcgctaaacgcttgcttttacgtcttctcctgcgatgatagaaagcagaaagcgatgaactttacaggcaatccataatgaaaaacgtgtttaaggcactcactgtattacttactctcttcagcctgacgggctgcggtctgaaaggtccgctctatttcccgcctgcagataaaaacgcaccgccgccgaccaaaccggtagagacgcaaacgcaatccacggtgccggataaaaacgatcgcgccactggcgatggtccatcccaggtgaattactaaaagtcagtttctgtacccgcgtgattggagtaaatgatgcagttctcgaaaatgcatggccttggcaacgattttatggtcgtcgacgcggtaacgcagaatgtctttttttcaccggagctgattcgtcgcctggctgatcggcacctgggggtagggtttgaccaactgctggtggttgagccgccgtatgatcctgaactggattttcactatcgcattttcaatgctgatggcagtgaagtggcgcagtgcggcaacggtgcgcgctgctttgcccgttttgtgcgtctgaaaggactgaccaataagcgtgatatccgcgtcagcaccgccaacgggcggatggttctgaccgtcaccgatgatgatctggtccgcgtaaatatgggcgaacccaacttcgaaccttccgccgtgccgtttcgcgctaacaaagcggaaaagacctatattatgcgcgccgccgagcagacaatcttatgcggcgtggtgtcgatgggaaatccgcattgcgtgattcaggtcgatgatgtcgataccgcggcggtagaaacgcttggtcctgttctggaaagccacgagcgttttccggagcgcgccaatatcggttttatgcaagtggttaagcgcgagcatattcgtttacgcgtttatgagcgtggggcaggagaaacccaggcctgcggcagcggcgcgtgtgcggcggttgcagtagggattcagcaaggtttgctggccgaagaagtacgcgtggaactccccggcggtcgtcttgatatcgcctggaaaggtccgggtcacccgttatatatgactggcccggcggtacatgtctacgacggatttattcatctatgaagcaaccaggggaagaactgcaggaaacactcacggagcttgatgaccgggcggttgtcgattatctgattaaaaatcctgagttttttatccgtaatgcgcgcgcagtagaagcgatacgtgtgccgcatccggtacgcggcaccgtttcgttggtcgagtggcacatggcccgcgcacgtaatcatattcatgttctggaagagaacatggcgctgttgatggaacaggctatcgccaacgaaggcctgttttatcgcctactctacctgcagcgcagtctcaccgccgccagcagtctcgacgatatgctgatgcgctttcaccgctgggcgcgcgatctcggcctggcaggtgcgagtctgcgcctgtttccggatcgctggcgcttaggtgcgccgtcgaaccacactcatctggcattaagccgtcagtctttcgaaccgctgcgtattcagcgtttggggcaggaacagcactatcttgggccgcttaacggaccagagctgctggtggtgctaccggaagcgaaagcggtgggatcggtggcgatgtcgatgctgggaagcgatgctgatttgggtgtcgtgctgtttaccagtcgcgatgccagtcactatcaacaagggcaaggaacgcagttacttcatgaaattgcgctgatgttgccggagcttctggagcgttggattgaacgcgtatgaccgatttacacaccgatgtagaacgctacctacgttatctgagcgtggagcgccagcttagcccgataaccctgcttaactaccagcgtcagcttgaggcgatcatcaattttgccagcgaaaacggcctgcaaagctggcagcaatgtgatgtgacgatggtgcgcaattttgctgtacgcagtcgccgtaaagggctgggagcagcaagtctggcgttacggctttctgcgctacgtagcttttttgactggctggtcagccagaacgaactcaaagctaacccggcgaaaggtgtttcggcaccgaaagcgccgcgtcatctgccgaaaaacatcgacgtcgacgatatgaatcggctgctggatattgatatcaatgatcccctcgctgtacgcgaccgtgcaatgctggaagtgatgtacggcgcgggtctgcgtctttctgagctggtggggctggatattaaacacctcgacctggagtctggtgaagtgtgggttatggggaaaggcagcaaagagcgccgcctgccgattggtcgcaacgctgtggcgtggattgagcactggcttgatttgcgcgacctgtttggtagcgaagacgacgcgctttttctgtcgaaactgggcaagcgtatctccgcgcgtaatgtgcagaaacgctttgccgaatggggcataaaacaagggctgaataatcacgttcatccgcataaattacgtcactcgttcgccacgcatatgctggagtcgagcggcgatcttcgtggtgtgcaggagctgctgggtcatgccaacctctccaccacgcaaatctatactcatcttgattttcaacaccttgcctcggtgtacgatgcggcgcatccacgcgccaaacgggggaaataatgcgtttttaccggcctttggggcgcatctcggcgctcacctttgacctggatgataccctttacgataaccgtccggtgattttgcgcaccgagcgagaggcgcttacctttgtgcaaaattatcatccggcgctgcgcagcttccagaatgaagatctgcaacgcctgcgccaggcggtacgggaagcggaacccgagatttatcacgacgtgacgcgctggcgttttcgttcgattgaacaagcgatgctcgacgccgggctgagtgccgaagaagccagtgcaggcgcacacgcagcaatgatcaactttgccaaatggcgcagccgaatcgacgtcccgcagcaaactcacgacaccttaaaacagctggcgaagaaatggccgctggtggcgatcaccaacggtaacgcccagccggagctgtttggtttgggggattattttgagtttgtgctgcgcgctggcccgcacgggcgctcaaaaccgttcagcgatatgtactttttggctgcggaaaaactcaacgtgccgatcggcgagatcttacatgttggggacgatctcaccactgacgtgggtggggcaattcgcagcggaatgcaggcttgttggatcagaccggaaaatggcgatctgatgcaaacctgggacagccgtttactgccgcatctggaaatttcccggttggcatctctgacctcgctgatataatcagcaaatctgtatatatacccagctttttggcggagggcgttgcgcttctccgcccaacctatttttacgcggcggtgccaatggacgtttcttacctgctcgacagccttaatgacaaacagcgcgaagcggtggccgcgccacgcagcaaccttctggtgctggcgggcgcgggcagtggtaagacgcgcgtactggtgcatcgtatcgcctggttgatgagcgtggaaaactgctcgccatactcgattatggcggtgacgtttaccaacaaagcggcggcggagatgcgtcatcgtatcgggcaactgatgggcacgagccagggcggtatgtgggtcggcaccttccacgggctggcgcaccgtttgctgcgtgcgcaccatatggacgccaatctgccgcaggatttccagatcctcgacagtgaagaccagctacgcctgcttaagcgtctgatcaaagccatgaacctcgacgagaagcagtggccgccgcggcaggcaatgtggtacatcaacagccagaaagatgaaggcctgcgtccgcatcatattcaaagctacggtaatccggtggagcagacctggcagaaggtgtatcaggcgtatcaggaagcgtgtgaccgcgcgggcctggtggacttcgccgagctgctgctgcgcgctcacgagttgtggcttaacaagccgcatatcctgcaacactaccgcgaacgttttaccaatatcctggtggacgaattccaggataccaacaacattcagtacgcgtggatccgcctgctggcgggcgacaccggcaaagtgatgatcgtcggtgatgacgaccagtcaatctacggctggcgcggggcgcaggtggagaatattcagcgtttccttaatgatttccccggtgccgaaactattcgtctggagcaaaactaccgctctaccagcaatattctgagcgccgctaacgccctgattgaaaacaataacgggcgtctgggtaaaaaactgtggaccgatggcgcggacggtgagcctatttccctctattgcgcttttaacgaactcgatgaagcgcgttttgtggttaaccgcatcaaaacctggcaggacaacggcggagcgcttgccgagtgcgccattctctaccgcagcaacgcccagtcgcgggtgctcgaagaggcgttattgcaggccagtatgccgtaccgtatttacggcgggatgcgcttcttcgaacgccaggaaatcaaagatgcgctctcgtatctgcgcctgattgccaaccgcaacgacgacgcggcctttgagcgtgtggtgaatacgccaacgcggggtattggtgaccggacgctggacgtggtacgtcagacatcgcgcgatcgccagttaacactctggcaggcatgtcgtgagctgttgcaggaaaaagccctcgccgggcgagctgccagcgccttgcagcgatttatggaattaatcgacgccttagcgcaggaaactgccgatatgccgctgcatgtacagactgaccgggtaattaaagactccggcctgcgtaccatgtatgagcaggagaagggcgaaaaaggtcagacgcgtatcgaaaacttagaggaactggtgacggcaacgcgccagttcagctacaacgaagaagacgaagatttaatgccgctgcaggcgttcctctcccatgcggcactggaagcaggtgaagggcaggcggatacctggcaggatgcggtgcagttgatgacgctacactcggcgaaaggcctggagttcccgcaggtgtttatcgttggtatggaagagggcatgttcccaagccagatgtcgctggatgaaggcgggcgtctggaagaagaacgccgtctggcctacgttggcgtaacccgcgcgatgcagaaactgacgctgacctacgcggaaacccgccgtctgtatggtaaagaggtttaccatcgcccgtcgcgctttatcggcgagctgccggaagagtgtgtggaagaggtgcgcctgcgcgccacggtaagccgcccggtcagccatcagcggatgggtacgccgatggtcgagaacgacagcggctacaagctcggccagcgcgtacgccacgctaagtttggtgaaggcaccattgtcaatatggaaggcagcggtgagcatagccgtttgcaggtggcatttcagggccagggtattaaatggctggtggcggcatacgcccggctggagtcggtgtaacgttgccggatgcggtgctgcgcaccttatttggcctaaaaaatcattcagattcaataaattgcaacgtcatgtaggccggatagggcgtttacgccgcatccggcatctgcgccatcttcagtatctgacacaaaactatcgttttaacctttccgctcgacggaaatcatggtgacaaaaggatagcgttgccacgggattgccccgcctttcatatacatatgtgaaatcgtgccatcaagataaagcagctgctcaacgttcagtttcgctttggcataacaggcaaaatcataaaaatttgttgcctgctggctcaacaaaaacacggcgttcccatgtttattaatcccaacaccgttacgaattttgcttgaggcgacgttgggatgaatacgcggattaattacaccgttttccatcaacattggccctgactgcaccgcaaactgaatctctttactggttttgaaggcatccagacgaacgatgccgactttatctcccgcgacataaaacacgccgccagacggataaagaaattcccttcacctgaagcgagatttaacgccaccttctgctgaccgttttcgatgtacaaaccgagcggcgcatagctttcatcatagatgccgccgttcatcgccatctgcacctgaccctgactattaatatccgccagcagagcatgtaacgttccccacgcttcgccattggctttttgccagtacattttcacccgctctgtttgaggattaacggtatacgcctgtacggtcagcgtcggatctgagagtgcgcaatcatcagcggcaacagcaaacaagggaagtaaggtgagggcgagaaaaatccgtttgagattcaaggtgatcattcctttaccaatgagtagctgatgcgccattataggtcctggatgtgggatttttttatcctgttagcgaccttgacgagtaccaaaaagcgcgaagttcaactattgttctgtggtgttctgttgcgtgttgacggcaaaattttgctggcgtaacatgcgcgcacgatcactctaagaggacattcgccttggacacacccagtagatactggctcactatcctgtcatccaggatcaactcctaaggctatccctttttgctgatagccttagcggttgtcagcgacctcaatttttcccgtcgcgctgagtcaggctgtttaatggtctgaaacccaatttgtttctgtgtgcccaccgaactgtccgatattttaagcattgggagtcccggtcatgctgagcgcatttcaactggaaaataaccgactgacccggctggaagtcgaagagtcacaaccccttgtaaatgcagtatggattgatcttgtcgaaccggacgacgacgagcgactgcgcgtacaatctgaacttggccagagcctggcaacccgcccggaactggaagacatcgaagcatcggcacgtttctttgaagacgacgacggcctgcatattcactccttcttcttctttgaagatgcggaagatcacgccggtaactccactgtggcatttaccatccgtgatggtcgtctgtttactctgcgtgagcgtgaactgcccgcttttcgtctgtatcgtatgcgtgcccgtagccagtcgatggtagacggtaacgcctacgagttgctgctggatctgttcgaaaccaaaatcgaacagttggcagatgaaattgaaaatatctatagcgacctggagcagttgagccgggtgattatggaagggcatcagggcgatgagtacgacgaggcgctctccactctggcggaactggaagatatcggctggaaagttcgcctgtgtctgatggatacccagcgcgcgctcaacttcctggtgcgtaaagcgcgtttaccgggtgggcaactggagcaggcgcgtgaaatcctgcgagatatcgaatccctgctgccgcataacgaatccctgttccagaaggtgaacttcctgatgcaggcggcaatgggttttatcaacatcgagcagaaccgcatcatcaaaatcttctcggtggtatccgtggtattcctgccgccgacgctcgttgcttccagctatggcatgaactttgagtttatgccagaactgaagtggagcttcggctaccctggcgcgattatctttatgatcctcgcgggcctggcaccgtatctgtactttaagcggaagaactggttgtaaaaaacgagagcggtggcttagtctggctaagccacctgttattcaaaggctccaggtatttaacccttttacctctttctcatagaaccatttgttcgtgttaacagcaacataggctgctacggcaattcccagaatgttaacgccaattagtgcaccaacaaatagagatagaataccaagtaatagaactataattgcttttttccataaccccaggacaaataaatatatccaggaacagaagaaagcaatgaaattcatttgaatagttaagcgttgtcttacttttaatgctttaaatgctgctttatattctggtgttgccccccagaatccaggaaaaccatgttgatcataaaaattaaatcggtatttccatttttcacttaatgaaccatcgttcatatattccttactcataaatactccataactattgttttgatgaatcagtaggtgcaagcattagcatactgaaagtggaaaaataacaaatcaaaaaaatcatcgaaccattgcctgaacaggcaaaatcttcggctatcattgtgatgatagagatgatatatactgctaatgtaccaaaaacataagtttttatatagatgaaaccactatcacggagtcgctggcaattcatgttgatgacgagataatggagtacgatggtagagactataacaagaaagcctgcttctccatcgttaaaaaagataataagaaaggcaaaaatgaaatttattaaaataaatgaaaatatataacgacgtctggaaatcttaccgttagatgttgggataaatatacgtaacataaattttacatccttgtatgagtctccggtcagcatggcaatatgcccactctcatgcaagagtcggcatattttttcagaatatatttattttttatttggacgttctacgctgcgtataaatcgcatccatcacaaaaattgccagcgccacccaaataaaggcgaaagtcaccatcttatcggcacccggtttttcaccataaaacgtcacagccagcaggaacatcagcgtcgggccaatgtactggaaaaagcctaacgttgagagacgcaagcgcgtggcagcggcggtaaaacacaacagcggtacggtagtgacaataccggcggcgatcagcagtaaattcagcgacatcgggttttgccccatatggctggttgagctgtcggcaatagcaaacaggtaaattgccgccacgggcagcagccacatggtttcgattaacatgccggtttgcgcttcaacggcaatcttcttgcgtaccagaccgtagaaggcaaaactaaatgccagtcccagcgcgataataggtagcgaaccaaaagtccacagctggactaacacgccacatatcgccagaatcaccgccagccattgcatccggcggaatccgtcgccgaggaaaatcatccccagcacaatgttcaccagcgggttaataaagtaaccaaggctccgttccagcatatggtgattgttcaccgcccagataaacagtagccagttgccaccaatcagcacggcagagactgccagcataaaaattttctgtggcgtctgaatcagcgtttttaaataggaccactggcggcaaatgctcatcagcaccaccataaagaaaaacgaccagatcacgcgatgcgtcaggatttcatcggcgggcacgtagtaaatcaacttgaagtacgtggcgctataccccaaataaaataagcggcaagagcgagtaatacgccctgccgcgtttgttttgcatccatcgggaatactcatttttaattggtaacagcagtttacctgcttttatgtcttcaacctaccatataggtggcggtggcactggcaatataaagctgttcttcattgtgtaattcaacgcgggcgacggcgactttattgcctgcacgcaacaggctactagtagcagtaaaacgctcgcccctgcctgggcgcagataatcaacgcgaagatcaatggtccccatccgcgatagccgctggcgtagttcatcttcactgatggtttcgtggcgggttaaggtacttcccacgcacaccagaccggcggcgacatccagcgccgacgcaatgaccccgccgtgcaaaatgctttgcgcccagttgcccaccatcattggctgatttttaaaggccagctgtgcgaactctttttcgtaacgctccagttccatccccaatgcgcggttaaatggcatgtgataaacaaacatctcacccactaatttcagggcttgttcagcggtcagtacggcagacatatcatccttacacttcattggttaatgaaatgttgattttatgcttctttgttgttggtttctactttaggaagggataactaacggctatggagttaagtatgtaaaatagcccgcagaaaaatattcaccttatcaataattcgttacggagaacacgaccgatgcggactctgcagggctggttgttgccggtgtttatgttgcctatggcagtatatgcacaagaggcaacggtgaaagaggtgcatgacgcgccagcggtgcgtggcagtattatcgccaatatgctgcaggagcatgacaatccgttcacgctctatccttatgacaccaactacctcatttacacccaaaccagcgatctgaataaagaagcgattgccagttacgactgggcggaaaatgcgcgtaaggatgaagtaaagtttcagttgagcctggcatttccgctgtggcgtgggattttaggcccgaactcggtgttgggtgcgtcttatacgcaaaaatcctggtggcaactgtccaatagcgaagagtcttcaccgtttcgtgaaaccaactacgaaccgcaattgttcctcggttttgccaccgattaccgttttgcaggttggacgctgcgcgatgtggagatggggtataaccacgactctaacgggcgttccgacccgacctcccgcagctggaaccgcctttatactcgcctgatggcagaaaacggtaactggctggtagaagtgaagccgtggtatgtggtgggtaatactgacgataacccggatatcaccaaatatatgggttactaccagcttaaaatcggctatcacctcggtgatgcggtgctcagtgcgaaaggacagtacaactggaacaccggctacggcggcgcggagttaggcttaagttacccgatcaccaaacatgtgcgcctttatactcaggtttacagcggctatggcgaatcgctcatcgactataacttcaaccagacccgtgtcggtgtgggggttatgctaaacgatttgttttgatgaacggttgagtggttggcaaatctggaatccagcatccaggattaccctctcagagactaaaagcattgcagtttctcgcgcaggcgctgaaaatagcgcctgtttttatttcaggcaatcggggtgaatgtggcgcaggcggaagtgttgaatctggagtccggagctaaacaggttttacaagaaacctttggctaccaacagtttcgccccggccaggaagaaattatcgacactgtgctttccggccgcgattgcctcgtcgtcatgcccactggtggcggaaaatccctttgctatcaaatccctgccttattgctaaacggccttaccgtggttgtttcaccgctgatttcgttgatgaaagatcaggtggatcaactgcaagccaacggcgtggcggcggcgtgccttaactcgacgcaaacccgcgaacagcaacttgaagtgatgacaggctgccgcaccgggcaaattcgtctgctttatatcgccccggaacgcctgatgctggataactttcttgagcatctggcgcactggaatccggtgttattagccgttgatgaagcgcactgtatctcccaatggggccacgatttccgcccggaatatgccgcgctcggtcagttgcgccagcggttcccgacgctgccgtttatggcgctgaccgccacagccgacgacaccacgcgccaggatatcgtgcgcctgctggggctgaacgatccgctgattcaaatcagcagttttgaccgtccgaatattcgctacatgctgatggagaagttcaaaccgctcgatcagttgatgcgctacgtgcaggaacagcgcggtaagtcaggcattatctactgcaacagccgcgcgaaagtagaagacaccgctgcgcgcctgcaaagcaagggaattagcgcggcggcctatcatgccgggctggaaaataatgttcgcgccgatgtgcaggaaaaattccagcgcgatgacctgcaaattgtggtggcgacggtggcgttcggcatgggcatcaataaaccaaacgttcgcttcgtggtccactttgatattccgcgcaatatcgaatcctattatcaggaaaccggacgcgccgggcgtgatggcctgcccgcggaagcgatgctgttttacgatccggctgatatggcgtggctgcgccgttgtctggaagagaagccgcaggggcagttgcaggatatcgagcgccacaaactcaatgcgatgggcgcgtttgccgaagcgcaaacttgccgtcgtctggtattgctgaactattttggcgaagggcgtcaggagccgtgcgggaactgcgatatctgcctcgatccgccgaaacagtacgacggttcaaccgatgctcagattgccctttccaccattggtcgtgtgaatcagcggtttgggatgggttatgtggtggaagtgattcgtggtgctaataaccagcgtatccgcgactatggtcatgacaaactgaaagtctatggcatgggccgtgataaaagccatgaacattgggtgagcgtgatccgccagctgattcacctcggcctggtgacgcaaaatattgcccagcattctgccctacaactgacagaggccgcgcgcccggtgctcgcggaatcctctttgcaacttgccgtgccgcgtatcgtggcgctcaaaccgaaagcgatgcagaaatcgttcggcggcaactatgatcgcaaactgttcgccaaattacgcaaactgcgtaaatcgatagccgatgaaagtaatgtcccgccgtacgtggtgtttaacgacgcaaccttgattgagatggctgaacagatgccgatcaccgccagcgaaatgctcagcgttaacggcgttgggatgcgcaagctggaacgctttggcaaaccgtttatggcgctgattcgtgcgcatgttgatggcgatgacgaagagtagtcagcagcataaaaaagtgccagtatgaagactccgtaaacgtttcccccgcgagtcaaatgtatgttgatgttatttctcaccgtcgccatggtgcacattgtggcgcttatgagccccggtcccgatttcttttttgtctctcagaccgctgtcagtcgttcccgtaaagaagcgatgatgggcgtgctgggcattacctgcggcgtaatggtttgggctgggattgcgctgcttggcctgcatttgattatcgaaaaaatggcctggctgcatacgctgattatggtgggcggtggctgtatctctgctggatgggttaccagatgctacgtggtgcactgaaaaaagaggcggtttctgcacctgcgccacaggtcgagctggcgaaaagtgggcgcagtttcctgaaaggtttactgaccaatctcgctaatccgaaagcgattatctactttggctcggtgttctcattgtttgtcggtgataacgttggcactaccgcgcgctggggcatttttgcgctgatcattgtcgaaacgctggcgtggtttaccgtcgttgccagcctgtttgccctgccgcaaatgcgccgtggttatcaacgtctggcgaagtggattgatggttttgccggggcgttatttgccggatttggcattcatttgattatttcgcggtgatgccagacgcgtcttcagagtaagtcggataaggcgtttacgccgcatccgacattatttttcacgcatgcctcgccgatgctaacagcgctcccaccagcataaacaacgagccgaaaatcttattcagcgccttcatctgctttggtcctttaatccatagagcaatccgttgagcaagggtggcgtaaccgatcatcacaataatatcgaccacaatagtggtgacgccgagcacgatatactgcatcagttgcggctgttgcggcatgatgaattgcggaaatagcgccgccagaaacacaatacttttgggattggtgagattcacaaaaactgcgcgctggaacaaatgtcgacgcgattgagtagaggccagcgatttaaggtcaattgcaccagcggcgcgccactgctggattcccagccaaatcaagtaagccgcgcctgcccacttcaacacttcaaacgcaatcactgagcgggaaaatagcgtcccaaccccacgccaaccagcacaatatgaatcgccagtccggtctgaagcccagcaatagacgccaccgcgccgcgataaccgtggttgagcgaggtggtcatagtgttgattgcaccagagcctggcgacaggcttaaaatgatcgatgtcagcaggtaggcaaaccaccattctaaggtcatgatgaactcccggtgtgtctatttttgtgccacaatacgctactgtcgcagcgttgtgtcaggcacgctaaaaaaaacgattttacgtggtttaagaggcagattacccgatgtttcagcagcaaaaagactgggaaacaagagaaaacgcgtttgctgcttttaccatgggaccgctgactgatttctggcgtcagcgtgatgaagcagagtttactggtgtggatgacattccggtgcgctttgtccgttttcgcgcacagcaccatgaccgggtggtagtcatctgcccggggcgtattgagagctacgtaaaatatgcggaactggcctatgacctgttccatttggggtttgatgtcttaatcatcgaccatcgcgggcagggacgttccggtcgcctgttagccgatccgcatctcgggcatgttaatcgctttaatgattatgttgatgatctggcggcattctggcagcaggaggttcagcccggtccgtggcgtaaacgctatatactggcacattcgatgggcggtgcgatctccacattatttctgcaacgccatccaggtgtatgtgacgccattgcgctaactgcgccaatgtttgggatcgtgattcgtatgccgtcatttatggcacggcagatcctcaactgggccgaagcgcatccacgtttccgtgatggctatgcaataggcaccgggcgctggcgcgcgttgccgtttgctatcaacgtactgacccacagcagacagcgatatcgacgtaacttacgcttctatgctgatgacccaacgattcgcgtcggtgggccgacctaccattgggtacgcgaaagtattctggctggcgaacaggtgttagccggtgcgggtgatgacgccacgccaacgcttctcttgcaggctgaagaggaacgcgtggtggataaccgcatgcatgaccgtttttgtgaactccgcaccgccgcgggccatcctgtcgaaggaggacggccgttggtaattaaaggtgcttaccatgagatcctttttgaaaaggacgcaatggcctcagtcgcgctccacgccatcgttgattttttcaacaggcataactcacccagcggaaaccgctctacagaggtttaaatttcttatgtaccaggttgttgcgtctgatttagatggcacgttactttctcccgaccatacgttatccccttacgccaaagaaactctgaagctgctcaccgcgcgccatcaactttgtgtttgcgaccggtcgtcaccacgttgatgtggggcaaattcgcgataatctggagattaagtcttacatgattacctccaatggtgcgcgcgttcacgatctggatggtaatctgatttttgctcataacctggatcgcgacattgccagcgatctgtttggcgtagtcaacgacaatccggacatcattactaacgtttatcgcgacgacgaatggtttatgaatcgccatcgcccggaagagatgcgcttttttaaagaagcggtgttccaatatgcgctgtatgagcctggattactggagccggaaggcgtcagcaaagtgttcttcacctgcgattcccatgaacaactgctgccgctggagcaggcgattaacgctcgttggggcgatcgcgtcaacgtcagtttctctaccttaacctgtctggaagtgatggcgggcggcgtttcaaaggccatgcgctggaaggctggcgaactggctacagctgaaggattgattgcgttgtgacgggatgaacgacgccgaaatgctgtcgatggcgggaaagctgcattatgggcagtggccaccagcgtctgaaagaccttcatcccgagctgaagtgattggtactaatgccgacgacgcggtgccgcattatctgcgtaaactctatttatcgtaatcgttctttatttggtcagttgtcaacctgatacttcgctacaatggatacccgttaatcaaagagttttccattgtggcgctacttatcatcaccacgattctgtgggccttctcctttagcttttatggcgagtaccttgcggggcacgtcgatagctattttgcggtgctggtgcgcgttggcctggcggcactcgtttttctgccgtttctgcgtacccgtggcaatagcctgaaaacggtcggcctgtatatgctggtgggcgcgatgcagcttggcgtgatgtatatgctgagtttccgcgcttatctctacctgacggtttccgagctgctgctgttcaccgtgctgacgccgctctacatcacgctgatttatgacatcatgagtaagcgccgtctgcgctggggctatgcctttagcgccttgctggcggtgattggtgccgggattattcgctatgatcaggtcaccgaccatttctggactggcttgctgctggtgcaactctccaatatcacttttgccattggcatggtgggttacaaacgcctgatggaaactcgcccgatgccacagcataacgcctttgcgtggttctatcttggcgcgtttctggtggcagtgattgcatggttcttgctgggaaatgcgcagaaaatgccgcaaaccacgctgcaatggggcattctggtgtttcttggcgtggtggcttccgggattggctactttatgtggaactacggcgcgacgcaggtggacgccggaacgctgggcattatgaataatatgcacgttccggcagggctgctggtaaacctggctatctggcaccaacagccgcactggccaacgtttattacaggcgcgctggtgatcctggcctcactgtgggtgcatcgtaagtgggtcgctccgcgctcttcacaaacggcagatgatcgcaggcgtgattgcgcgctgagcgaataaacgcttccgtaactggctgacgctgctcgccatcgcgcacggcggcgtacagtcggctccacaagccttcgcccagggttttggtcaccaccagaccctggcgctcaaaactctctactacccaatgcggtagcgcggcaatacccatccgcgcggcaaccatctgaatcaacaataaggtgttatcgacgcttttcagtgacgggctgacgcctgccggctgaagaaaatgccgccagacatccagtcgactacgctgcaccggataaattaatagcgtctcgctggcgagatcttccggtgtaattcgcgttttcgccgccagtggatggtcaggtgctaacaccagacgcacttcatagtcgaacatcggcgaataatgcaggccactgcgcggcagaatatcggacgtcattaccagatccagctctccctgttgcaaggcgggctgcgggtcaaatgtcacgcccgatttaaaatccatctctacctgcggccagttcttatggaaattttctaacgcgggtgtcagccactgaatacagctatggcactcaatggcaatgcgcagacgcgtctgctgcggttcattgcaggcttgcagggcctggctaatttgcggcagtacctggtttgccagttgcaacaggatttctccctgcggtgtaaagcgtagcggctggctcttacgcacaaatagccggaagccaaggcgttgttccagatcgctaaactggtgagacagggcggattgcgtctgatgcaacgtcgccgcagcggctgcgagcgagccgcagttccgcaacgcttgtagcgttttcaggtgttttacttcgatcatgaaagtccttcacttcggcatgaataatttgcgcttgaggaatatacagtaaccgccaattatggatgtgtaaacatctggacggctaaaatccttcgtcttttaaatttatggtgcgttggctgcgtttctccaccccggtcacttacttcagtaagctcccggggatgaataaacttgccgccttccctaaattcaaaatccataggatttacatataattagaggaagaaaaaatgacaatattgaatcacaccctcggtttccctcgcgttggcctgcgtcgcgagctgaaaaaagcgcaagaaagttattgggcggggaactccacgcgtgaagaactgctggcggtagggcgtgaattgcgtgctcgtcactgggatcaacaaaagcaagcgggtatcgacctgctgccggtgggcgattttgcctggtacgatcatgtactgaccaccagtctgctgctgggtaacgttccggcgcgtcatcagaacaaagatggttcggtagatatcgacaccctgttccgtattggtcgtggacgtgcgccgactggcgaacctgcggcggcagcggaaatgaccaaatggtttaacaccaactatcactacatggtgccggagttcgttaaaggccaacagttcaaactgacctggacgcagctgctggacgaagtggacgaggcgctggcgctgggccacaaggtgaaacctgtgctgctggggccggttacctggctgtggctggggaaagtgaaaggtgaacaatttgaccgcctgagcctgctgaacgacattctgccggtttatcagcaagtgctggcagaactggcgaaacgcggcatcgagtgggtacagattgatgaacccgcgctggtactggaactaccacaggcgtggctggacgcatacaaacccgcttacgacgcgctccagggacaggtgaaactgctgctgaccacctattttgaaggcgtaacgccaaatctcgacacgattactgcgctgcctgttcagggtctgcatgttgacctcgtacatggtaaagatgacgttgctgaactgcacaagcgcctgccttctgactggttgctgtctgcgggtctgatcaatggtcgtaacgtctggcgcgccgatcttaccgagaaatatgcgcaaattaaggacattgtcggcaaacgtgatttgtgggtggcatcttcctgctcgttgctgcacagccccatcgacctgagcgtggaaacgcgtcttgatgcagaagtgaaaagctggtttgccttcgccctacaaaaatgccatgaactggcactgctgcgcgatgcgctgaacagtggtgacacggcagctctggcagagtggagcgccccgattcaggcacgtcgtcactctacccgcgtacataatccggcggtagaaaagcgtctggcggcgatcaccgcccaggacagccagcgtgcgaatgtctatgaagtgcgtgctgaagcccagcgtgcgcgttttaaactgccagcgtggccgaccaccacgattggttccttcccgcaaaccacggaaattcgtaccctgcgtctggatttcaaaaagggcaatctcgacgccaacaactaccgcacgggcattgcggaacatatcaagcaggccattgttgagcaggaacgtttgggactggatgtgctggtacatggcgaggccgagcgtaatgacatggtggaatactttggcgagcacctcgacggatttgtctttacgcaaaacggttgggtacagagctacggttcccgctgcgtgaagccaccgattgtcattggtgacattagccgcccggcaccgattaccgtggagtgggcgaagtatgcgcaatcgctgaccgacaaaccggtgaaagggatgctgacggggccggtgaccatactctgctggtcgttcccgcgtgaagatgtcagccgtgaaaccatcgccaaacagattgcgctggcgctgcgtgatgaagtggccgatctggaagccgctggaattggcatcatccagattgacgaaccggcgctgcgcgaaggtttaccgctgcgtcgtagcgactgggatgcgtatctccagtggggcgtagaggccttccgtatcaacgccgccgtggcgaaagatgacacacaaatccacactcacatgtgttattgcgagttcaacgacatcatggattcgattgcggcgctggacgcagacgtcatcaccatcgaaacctcgcgttccgacatggagttgctggagtcgtttgaagagtttgattatccaaatgaaatcggtcctggcgtctatgacattcactcgccaaacgtaccgagcgtggaatggattgaagccttgctgaagaaagcggcaaaacgcattccggcagagcgcctgtgggtcaacccggactgtggcctgaaaacgcgcggctggccagaaacccgcgcggcactggcgaacatggtgcaggcggcgcagaacttgcgtcgggggtaaaatccaaaccgggtggtaataccacccggtcttttctcattacagcgacttcttcccaccatactgcttaaaccattccagcatacgctgccagccatcttctgcagatgcggcatgatagctcgggcgataatcagcgttgaatgcatgcccggcgtccgggtacacgataatctctgctttcgcattagcagcccgcagcgcctggcgcatggtttcaacgctctcctgcggaatgctgttatcctgaccaccatataagccgagaatccggcgttaagatcggttgcgatatcaacaggttgtttcggtgaattcagcgacttgtcgcccgtcagtttgccgtaccacgccactgcggcttttagctgtggattatgcgcggcatacagccaggtgatacgtccaccccagcagaatccggtgatcattaaacgatgaacatcgccgccgttgcgggaagcccaactggcgacatgatcgagatcggccagcacctgcgagtcaggcacttttgctaccagaccgctaagcaacgtggggatatcggcaaaatcattcggatcgccttcgcggaagtaaagttcaggtgcgatagccagatacccctccagcgccagacggcgacaaatgtcgcggatatgttcatgcacgccaaaaatttcctgcactacaatgaccactggcagtgggccatcgctttgctttggtctggcatggtaagcaggcatgttatccccttgtgaagggatagaggtgaagcccgccacaatcgcgtcgtccggggtctgaacgatggtcgaagcgagaggcatgcagcaggtgcaaatccagattgttgtgttgttgccatggtattctccgtaccttataaaaatgttgcgcaatgttaactatagtcagcatgcaacaaatcacattgcctgaatcggctcatcttttatgcagtcctgcagaatgaagggtgatttatgtgatttgcatcacttttggtgggtaaatttatgcaacgcatttgcgtcatggtgatgagtatcacgaaaaaatgttaaacccttcggtaaagtgtctttttgcttcttctgactaaaccgattcacagaggagttgtatatgtccaagtctgatgtttttcatctcggcctcactaaaaacgatttacaaggggctacgcttgccatcgtccctggcgacccggatcgtgtggaaaagatcgccgcgctgatggataagccggttaagctggcatctcaccgcgaattcactacctggcgtgcagagctggatggtaaacctgttatcgtctgctctaccggtatcggcggcccgtctacctctattgctgttgaagagctggcacagctgggcattcgcaccttcctgcgtatcggtacaacgggcgctattcagccgcatattaatgtgggtgatgtcctggttaccacggcgtctgtccgtctggatggcgcgagcctgcacttcgcaccgctggaattcccggctgtcgctgatttcgaatgtacgactgcgctggttgaagctgcgaaatccattggcgcgacaactcacgttggcgtgacagcttcttctgataccttctacccaggtcaggaacgttacgatacttactctggtcgcgtagttcgtcactttaaaggttctatggaagagtggcaggcgatgggcgtaatgaactatgaaatggaatctgcaaccctgctgaccatgtgtgcaagtcagggcctgcgtgccggtatggtagcgggtgttatcgttaaccgcacccagcaagagatcccgaatgctgagacgatgaaacaaaccgaaagccatgcggtgaaaatcgtggtggaagcggcgcgtcgtctgctgtaattctcttctcctgtctgaaggccgacgcgttcggccttttgtatttttgcgtagcgcctcgcaggaaatgcctttccaactggacgtttgtacagcacaattctattttgtgcgggtaagttgttgcgtcaggaggcgttgtggatttctcaatcatggtttacgcagttattgcgttggtgggtgtggcaattggctggctgtttgccagttatcaacatgcgcagcaaaaagccgagcaattagctgaacgtgaagagatggtcgcggagttaagcgcggcaaaacaacaaattacccaaagcgagcactggcgtgcagagtgcgagttactcaataacgaagtgcgcagcctgcaaagtattaacacctctctggaggccgatctgcgtgaagtaaccacgcggatggaagccgcacagcaacatgctgacgataaaattcgccagatgattaacagcgagcagcgcctcagtgagcagtttgaaaacctcgccaaccgtatttttgagcacagcaatcgccgggttgatgagcaaaaccgtcagagtctgaacagcctgttgtcgccgctacgtgaacaactggacggtttccgccgtcaggttcaggacagcttcggtaaagaagcacaagaacgccataccctgacccacgaaattcgcaatctccagcaactcaacgcgcaaatggcccaggaagcgatcaacctgacgcgcgcgctgaaaggcgacaataaaacccagggcaactggggcgaggtagtattgacgcgggtgctggaggcttccggtctgcgtgaagggtatgaatatgaaacccaggtcagcatcgaaaatgacgcccgctcgcggatgcagccggatgtcatcgtgcgcctgccgcagggaaaagatgtggtgatcgacgccaaaatgacgctggtcgcctatgaacgctattttaacgccgaagacgactacacccgcgaaagcgcgctacaggaacatatcgcgtcggtgcgtaaccatatccgtttgctgggacgcaaagattatcaacagctgccggggctgcgaactctggattacgtgctgatgtttattcccgttgaacccgcttttttactggcgcttgaccgccagccggagctgatcaccgaagcgttgaaaaacaacatcatgctggttagcccgactacgctgctggtggcgctgcgcactatcgccaacctgtggcgttatgagcatcaaagccgcaacgcccagcaaatcgccgatcgtgccagcaagctgtacgacaagatgcgtttgttcatcgatgacatgtccgcgattggtcaaagtctcgacaaagcgcaggataattatcggcaggcaatgaaaaaactctcttcagggcgcggaaatgtgctggcgcaggcagaagcgtttcgcggtttaggagtagaaattaaacgcgagattaatccggatttggctgaacaggcggtgagccaggatgaagagtatcgacttcggtcggttccggagcagccgaatgatgaagcttatcaacgcgatgatgaatataatcagcagtcgcgctagcccattgggagtagttaagccgggtagaaatctagggcatcgacgcccaatctgttacacttctggaacaattttttgatgagcaggcattgagatggtggataagtcacaagaaacgacgcactttggttttcagaccgtcgcgaaggaacaaaaagcggatatggtcgcccacgttttccattccgtggcatcaaaatacgatgtcatgaatgatttgatgtcatttggtattcatcgtttgtggaagcgattcacgattgattgcagcggcgtacgccgtgggcagaccgtgctggatctggctggtggcaccggcgacctgacagcgaaattctcccgcctggtcggagaaactggcaaagtggtccttgctgatatcaatgaatccatgcccaaaatgggccgcgagaagctgcgtaatatcggtgtgattggcaacgttgagtatgttcaggcgaacgctgaggcgctgccgttcccggataacacctttgattgcatcaccatttcgtttggtctgcgtaacgtcaccgacaaagataaagcactgcgttcaatgtatcgcgtgctgaaacccggcggccgcctgctggtgcttgagttctcgaagccaattatcgagccgctgagcaaagcctatgatgcatactccttccatgtgctgccgcgtattggctcactggtcgcgaacgacgccgacagctaccgttatctggcagaatccatccgtatgcatcccgatcaggataccctgaaagccatgatgcaggatgccggattcgaaagtgtcgactactacaatctgacggcaggggttgtggcgctgcatcgtggttataagttctgacaggagaccggaaatgccttttaaacctttagtgacggcaggaattgaaagtctgctcaacaccttcctgtatcgctcacccgcgctgaaaacggcccgctcgcgtctgctgggtaaagtattgcgcgtggaggtaaaaggcttttcgacgtcattgattctggtgttcagcgaacgccaggttgatgtactgggcgaatgggcaggcgatgctgactgcaccgttatcgcctacgccagtgtgttgccgaaacttcgcgatcgccagcagcttaccgcactgattcgcagtggtgagctggaagtgcagggcgatattcaggtggtgcaaaacttcgttgcgctggcagatctggcagagttcgaccctgcggaactgctggccccttataccggtgatatcgccgctgaaggaatcagcaaagccatgcgcggaggcgcaaagttcctgcatcacggcattaagcgccagcaacgttatgtggcggaagccattactgaagagtggcgtatggcacccggtccgcttgaagtggcctggtttgcggaagagacggctgccgtcgagcgtgctgttgatgccctgaccaaacggctggaaaaactggaggctaaatgacgccaggtgaagtacggcgcctatatttcatcattcgcacttttttaagctacggacttgatgaactgatccccaaaatgcgtatcaccctgccgctacggctatggcgatactcattattctggatgccaaatcggcataaagacaaacttttaggtgagcgactacgactggccctgcaagaactggggccggtttggatcaagttcgggcaaatgttatcaacccgccgcgatctttttccaccgcatattgccgatcagctggcgttattgcaggacaaagttgctccgtttgatggcaagctggcgaagcagcagattgaagctgcaatgggcggcttgccggtagaagcgtggtttgacgattttgaaatcaagccgctggcttctgcttctatcgcccaggttcataccgcgcgattgaaatcgaatggtaaagaggtggtgattaaagtcatccgcccggatattttgccggttattaaagcggatctgaaacttatctaccgtctggctcgctgggtgccgcgtttgctgccggatggtcgccgtctgcgcccaaccgaagtggtgcgcgagtacgaaaagacattgattgatgaactgaatttgctgcgggaatctgccaacgccattcagcttcggcgcaattttgaagacagcccgatgctctacatcccggaagtttaccctgactattgtagtgaagggatgatggtgatggagcgcatttacggcattccggtgtctgatgttgcggcgctggagaaaaacggcactaacatgaaattgctggcggaacgcggcgtgcaggtgttcttcactcaggtctttcgcgacagctttttccatgccgatatgcaccctggcaacatcttcgtaagctatgaacacccggaaaacccgaaatatatcggcattgattgcgggattgttggctcgctaaacaaagaagataaacgctatctggcagaaaactttatcgccttctttaatcgcgactatcgcaaagtggcagagctacacgtcgattctggctgggtgccaccagataccaacgttgaagagttcgaatttgccattcgtacggtctgtgaacctatctttgagaaaccgctggccgaaatttcgtttggacatgtactgttaaatctgtttaatacggcgcgtcgcttcaatatggaagtgcagccgcaactggtgttactccagaaaaccctgctctacgtcgaaggggtaggacgccagctttatccgcaactcgatttatggaaaacggcgaagcctttcctggagtcgtggattaaagatcaggtcggtattcctgcgctggtgagagcatttaaagaaaaagcgccgttctgggtcgaaaaaatgccagaactgcctgaattggtttacgacagtttgcgccagggcaagtatttacagcacagtgttgataagattgcccgcgagcttcagtcaaatcatgtacgtcagggacaatcgcgttattttctcggaattggcgctacgttagtattaagtggcacattcttgttggtcagccgacctgaatgggggctgatgcccggctggttaatggcaggtggtctgatcgcctggtttgtcggttggcgcaaaacacgctgattttttcatcgctcaaggcgggccgtgtaacgtataatgcggctttgtttaatcatcatctaccacagaggaacatgtatgggtggtatcagtatttggcagttattgattattgccgtcatcgttgtactgctttttggcaccaaaaagctcggctccatcggttccgatcttggtgcgtcgatcaaaggctttaaaaaagcaatgagcgatgatgaaccaaagcaggataaaaccagtcaggatgctgattttactgcgaaaactatcgccgataagcaggcggatacgaatcaggaacaggctaaaacagaagacgcgaagcgccacgataaagagcaggtgtaatccgtgtttgatatcggttttagcgaactgctattggtgttcatcatcggcctcgccgccttctggggccgcaacgactgcctgtggcggtaaaaacggtagcgggctggattcgcgcgttgcgttcactggcgacaacggtgcagaacgaactgacccaggagttaaaactccaggagtttcaggacagtctgaaaaaggttgaaaaggcgagcctcactaacctgacgcccgaactgaaagcgtcgatggatgaactacgccaggccgcggagtcgatgaagcgttcctacgttgcaaacgatcctgaaaaggcgagcgatgaagcgcacaccatccataacccggtggtgaaagataatgaagctgcgcatgagggcgtaacgcctgccgctgcacaaacgcaggccagttcgccggaacagaagccagaaaccacgccagagccggtggtaaaacctgctgcggacgctgaaccgaaaaccgctgcaccttccccttcgtcgagtgataaaccgtaaacatgtctgtagaagatactcaaccgcttatcacgcatctgattgagctgcgtaagcgtctgctgaactgcattatcgcggtgatcgtgatattcctgtgtctggtctatttcgccaatgacatctatcacctggtatccgcgccattgatcaagcagttgccgcaaggttcaacgatgatcgccaccgacgtggcctcgccgttctttacgccgatcaagctgacctttatggtgtcgctgattctgtcagcgccggtgattctctatcaggtgtgggcatttatcgccccagcgctgtataagcatgaacgtcgcctggtggtgccgctgctggtttccagctctctgctgttttatatcggcatggcattcgcctactttgtggtctttccgctggcatttggcttccttgccaataccgcgccggaaggggtgcaggtatccaccgacatcgccagctatttaagcttcgttatggcgctgtttatggcgtttggtgtctcctttgaagtgccggtagcaattgtgctgctgtgctggatggggattacctcgccagaagacttacgcaaaaaacgcccgtatgtgctggttggtgcattcgttgtcgggatgttgctgacgccgccggatgtcttctcgcaaacgctgttggcgatcccgatgtactgtctgtttgaaatcggtgtcttcttctcacgcttttacgttggtaaagggcgaaatcgggaagaggaaaacgacgctgaagcagaaagcgaaaaaactgaagaataaattcaaccgcccgtcagggcggttgtcatatggagtacaggatgtttgatatcggcgttaatttgaccagttcgcaatttgcgaaagaccgtgatgatgttgtagcgtgcgcttttgacgcgggagttaatgggctactcatcaccggcactaacctgcgtgaaagccagcaggcgcaaaagctggcgcgtcagtattcgtcctgttggtcaacggcgggcgtacatcctcacgacagcagccagtggcaagctgcgactgaagaagcgattattgagctggccgcgcagccagaagtggtggcgattggtgaatgtggtctcgactttaaccgcaacttttcgacgccggaagagcaggaacgcgcttttgttgcccagctacgcattgccgcagatttaaacatgccggtatttatgcactgtcgcgatgcccacgagcggtttatgacattgctggagccgtggctggataaactgcctggtgcggttcttcattgctttaccggcacacgcgaagagatgcaggcgtgcgtggcgcatggaatttatatcggcattaccggttgggtttgcgatgaaccgacgcggactggagctgcgggaacttttgccgttgattccggcggaaaaattactgatcgaaactgatgcgccgtatctgctccctcgcgatctcacgccaaagccatcatcccggcgcaacgagccagcccatctgccccatattttgcaacgtattgcgcactggcgtggagaagatgccgcatggctggctgccaccacggatgctaatgtcaaaacactgtttgggattgcgttttagagtttgcggaactcggtattcttcacactgtgcttaatctctttattaataagattaagcaatagcatggagcgagcctcaccatcgggttcggtgaaaatggcctgaaagccttcgaacgcgccttcggtaataatcaccttatcacccggataaggggttgccggatcgacaatgtctttcggtttatataccgatagctgatgaataaccgccgatgggactatcgctggcgacgcgccaaagcgcacgaagtggctgacaccgcgggtcgcgttgatagtcgtggtatgaatcacttctgggtcaaattccacaaacaggtagttggggaacaatggctcactgactgcagtacgttttccacgcacgattttttccagggtgatcatcggtgccaggcaattcacagcctgtctttcgaggtgttcctgggcacgttgaagttgcccgcgcttgcagtacagtaaataccaggattgcataatgactcttatccgtttaatcggggcgcaaggatagcaaaagctttacgctaagttaattatattccccggtttgcgttataccgtcagagttcacgctaatttaacaaatttacagcatcgcaaagatgaacgccgtataatgggcgcagattaagaggctacaatggacgccatgaaatataacgatttacgcgacttcttgacgctgcttgaacagcagggtgagctaaaacgtatcacgctcccggtggatccgcatctggaaatcactgaaattgctgaccgcactttgcgtgccggtgggcctgcgctgttgttcgaaaaccctaaaggctactcaatgccggtgctgtgcaacctgttcggtacgccaaagcgcgtggcgatgggcatggggcaggaagatgtttcggcgctgcgtgaagttggtaaattattggcgtttctgaaagagccggagccgccaaaaggtttccgcgacctgtttgataaactgccgcagtttaagcaagtattgaacatgccgacaaagcggctgcgtggtgcgccctgccaacaaaaaatcgtctctggcgatgacgtcgatctcaatcgcattcccattatgacctgctggccggaagatgccgcgccgctgattacctgggggctgacagtgacgcgcggcccacataaagagcggcagaatctgggcatttatcgccagcagctgattggtaaaaacaaactgattatgcgctggctgtcgcatcgcggcggcgcgctggattatcaggagtggtgtgcggcgcatccgggcgaacgtttcccggtttctgtggcgctgggtgccgatcccgccacgattctcggtgcagtcactcccgttccggatacgctttcagagtatgcgtttgccggattgctacgtggcaccaagaccgaagtggtgaagtgtatctccaatgatcttgaagtgcccgccagtgcggagattgtgctggaagggtatatcgaacaaggcgaaactgcgccggaagggccgtatggcgaccacaccggttactataatgaagtcgatagtttcccggtatttaccgtgacgcatattacccagcgtgaagatgcgatttaccattccacctataccgggcgtccgccagatgagcccgcggtgctgggtgtcgcactgaacgaagtgtttgtgccgattctgcaaaaacagttcccggaaattgtcgatttttacctgccgccggaaggctgctcttatcgcctggcggtagtgacaatcaaaaaacagtacgccggacacgcgaagcgcgtcatgatgggcgtctggtcgttcttacgccagtttatgtacactaaatttgtgatcgtttgcgatgatgacgttaacgcacgcgactggaacgatgtgatttgggcgattaccacccgtatggacccggcgcgggatactgttctggtagaaaatacgcctattgattatctggattttgcctcgcctgtctccgggctgggttcaaaaatggggctggatgccacgaataaatggccgggggaaacccagcgtgaatggggacgtcccatcaaaaaagatccagatgttgtcgcgcatattgacgccatctgggatgaactggctatttttaacaacggtaaaagcgcctgatgcgcgtttgttttgccctatttatcgatccgacagagaaagcgcatgacaaccttaagctgtaaagtgacctcggtagaagctatcacggataccgtatatcgtgtccgcatcgtgccagacgcggccttttcttttcgtgctggtcagtatttgatggtagtgatggatgagcgcgacaaacgtccgttctcaatggcttcgacgccggatgaaaaagggtttatcgagctgcatattggcgcttctgaaatcaacctttacgcgaaagcagtcatggaccgcatcctcaaagatcatcaaatcgtggtcgacattccccacggagaagcgtggctgcgcgatgatgaagagcgtccgatgattttgattgcgggcggcaccgggttctcttatgcccgctcgattttgctgacagcgttggcgcgtaacccaaaccgtgatatcaccatttactggggcgggcgtgaagagcagcatctgtatgatctctgcgagcttgaggcgctttcgttgaagcatcctggtctgcaagtggtgccggtggttgaacaaccggaagcgggctggcgtgggcgtactggcaccgtgttaacggcggtattgcaggatcacggtacgctggcagagcatgatatctatattgccggacgttttgagatggcgaaaattgcccgcgatctgttttgcagtgagcgtaatgcgcgggaagatcgcctgtttggcgatgcgtttgcatttatctgagatataaaaaaacccgcccctgacaggcgggaagaacggcaactaaactgttattcagtggcatttagatctatgacgtatctggcaaaccatgcccgatgcgacgctgtcgcgtcttatcgtgcctacaaatagtccgaaccgtaggccggataaggcgtttacgccgcatccggcaattggtgcatgatgcctgatgcgacgctgtcgcgtcttatcgtgcctacaaatagtccgaaccgtaggccggataaggcgtttacgccgcatccggcaattggtgcatgatgcctgatgcgacgctggcgcgtcttatcaggcctacattggtgccggatcggtagaccggataaggcgttcacgccgcatccggcaagtggttaaacccgctcaaacaccgtcgcaataccctgacccagaccgatacacatcgtcgccagaccaaactgaacgtctttgcgttccatcagattcagcagcgtggtgctgatacgcgcaccggaacaacccagcggatgacccagcgcgatcgcgccaccgttgaggttgatcttctcgtcaatctgctcaattagtcccagatctttaatacatggcaggatctgcgcggcaaaggcttcgttcatttcaaacacgccgatatcgctggcagaaagccccgcttttttcagcgccagtttcgaggccggaaccgggccgtaacccataatcgatgggtcacaaccaacgaccgccatcgaacgcacacgagcgcgcggcttaagacctaattcatgggcgcggctttcactcatcaccagcatggcagctgcgccatcggaaagtgcagaagatgtgcccgccgttaccataccgtttactggatcaaacgccggacgcagcgtggcgagggcttccacggtggtttccgggcgaatcacttcgtcgtaattaaactgcttcaggacgccgtcggcatcgtgaccaccggtcgggatgatttcatttttaaatgcggccgactgcgtggcggcccaggcgcgggcgtgtgaccgcgcggcaaaggcatcctgcatttcacggctgataccgtgcatacgcgccagcatttctgccgttaagcccatcatgcccgccgctttggcgacattgcggctcaggccggggtgaaaatcgacgccgtgactcatcggcacatggcccatatgctccacgccgccaaccagacatgcctgcgcatcgccagtcatgatcattcgtgctgcgtcatgcagtgcctgcatggatgaaccacacaagcgattaacggtaaccgccgggacagagtgtggtacttctgccagcagcgccgcgttacgggcgatattaaaaccctgctccagcgtctgctgcacacaaccccagtaaatatcgtcgagggccgccgcttccagcgccgggttacgcgccagcagcgtacgcattaaatgagcggagagatcttctgcacgcacgttacgaaaagcaccgcccttcgaacggcccatcggggtgcgaattgcatcgacaatgacaacctgttccattgtgactccttaagccgttttcaggtcgccaaccggacgggctggctcaaccggaggatagtacggttcgttatgacgcgctttattacgcagaccttccggcacttcatacagcgggccgaggtgctgatattgctgtgccatatcgaggtattttgcgctaccgagggtgtccagccagcggaacgcgccgccgtggaacggagggaagcccaggccgtagaccagcgccatatccgcttccgccggagtggcgataatgccttcctccagacagcgcaccacttcgttgaccatcgggatcatcatgcgggcgataatctcttcttcgctgaaatcgcgcttcggctggctcacttctgccagcaggtcttcaacggcggcgtcttcttctttcttcggcttacctttgctgtcttctttataacgccagaaaccgaggccgttcttctgaccaaagcggttggcatcaaacagcgcgtcgatggcatcgcggtaatctttctgcatccgctgcgggaagcctgctgccatgacagcctgagcgtgatgcgcggtatcaatgcccacaacgtccagcagatatgccgggcccatcggccagccaaactgtttttccatcactttgtcgatcttgcggaaatccgcgccgtcgcgcagcagctggctgaaaccggcgaaatacgggaacagcacgcggttaacaaagaagccggggcagtcgttaaccacaatcggcgtcttgcccatcttgctcgcccaggcgacaactttcgcgatggtttcgtcggagcttttctcgccgcgaataatttctaccaacggcattcggtggaccgggttaaagaagtgcatcccgcagaagttttccgggcgttccagcgcgttggccagttcgctgataggaatggttgaagtgttagacgccagcacggtatcctggcgtactttttgttcggtttctgccagtacggcttttttcactttcgggttttcaacaaccgcttctaccacaatatccacgcggtcaaatccggcgtagtcgagcgttgggtggattgtggagatcacgccagccagtttcagaccatcgatcttgccgcgctcaagctgcttgttcagcagtttcgcggcttcggtcatgccgagggttaacgacttgtcgttgatatctttcatgacaaccggcacgcctttccacgcagactggtaagcgatgccgccgcccataatgcctgcacccagcaccgcggcctgtttcggggtttcaacgtctttggtgagtttcttcgctttgccttttacatattgatcgttaaggaaaatgccgaccagtgcgcgggcttcgttggtatgcgccagcgggacaaaacttttgttttccaggtttaaggcttcttcacgaccaaaacgggccgcagcttcaatggtttttactgcggtgatgggggccggataatgtttccccgctgtttgtgcgaccatccctttagcgatggtgaagctcatggtggcttcaatcttgctcagttttagtggttccagcttcggctgacgttttgctttccagtcgaggtcgccgttaatggcctggcgtaaaaccgcctttgcgccttcaaccagtttttctgctttgactacgccatccaccagaccgattttcagcgcctgatccgcgccgacatctttaccggcggcaatgatttccagcgcactgtcagcgcccagcatacgtggcatacgtacagaaccgccaaagccaggcatgatgcccagtttggtttccggcagaccgatgcgcagatccggcgtcgccagacgataatcggtcgccagcacgcattcgcagccaccgcccagcgcatagccattgacggcagcaatggtcggcaccggcagatcttccaggcgattaaacacgctattggcaaagtgcagccactgacttaactgttcttcaggaacgaggaacagggacaaaaattcggtgatatcagcaccgacgataaaggctgctttgttcgaacgcagcagcagcccttttagatctgattgctgttccagcacgccgatggcctcgccgaggctggcgacggtcgcagtgtcgagtttattaactgaacctggggcatcaaataccagttcggcaatgccatcttccagccagtcaaggtacagggtgtcgcctttgtaaagcatgtcagtctcctgaatccgcaaggtgatctggtcgtaccagatgagtcgaagtgtgtattttgtgttaaaaatatgcaaacaaaagattaaagaaatgccgatctgatcacgctcggcagaaatcacgctctggatgaacgatgtgctaagatgcggagacttaaggtcaaaaaaacagaagggtaaaaaatggaatcactggcctcgctctataaaaatcatatagctaccttacaagaacggactcgcgatgcgctggcgcgcttcaagctggatgcgttacttattcactccggcgagctgttcaatgtttttctcgacgatcatccctatccgtttaaagtgaacccgcaattcaaagcgtgggtgccggtaactcaggtgccaaactgctggttgctggtggatggcgtgaacaagccgaaactgtggttctatctgccggttgattactggcacaacgtcgaaccgctgccgacctctttctggactgaagatgtggaagtgatcgcgctgccgaaagccgatggcattggtagcctgctgcctgctgcgcgcggcaatatcggttatatcggtccggtgccggaacgtgcgctgcaactgggtattgaggccagcaacatcaacccgaaaggggttatcgactacctgcattactatcgctccttcaaaactgagtacgaactggcctgtatgcgtgaagcgcagaaaatggcggtcaacggtcaccgcgcggcagaagaagcgttccgttctggcatgagcgagttcgatatcaacattgcctatctgaccgcgaccggtcatcgtgataccgacgtaccttacagcaacattgtggcgcttaacgaacacgctgcggtactgcattacaccaaactggaccatcaggcaccggaagagatgcgcagcttcctgctggatgccggggcagaatataacggctatgcggctgacctgacccgtacctggtcggcaaaaagtgacaacgactacgcgcagctggtgaaggacgttaatgatgaacaactggcgctgatcgccaccatgaaagcaggcgtcagctatgtggattaccacatccagttccatcagcgcatcgccaaactgctgcgtaaacatcaaatcatcaccgatatgagtgaagaagcgatggtcgaaaacgatcttaccgggccgtttatgccgcatggtatcggccatccgctgggcctgcaggtgcatgacgtcgctggttttatgcaggatgatagcggtacgcacctcgcggcaccggcaaaatatccgtacctgcgctgcacccgtattctccagccgggcatggtgttaaccatcgaaccgggtatctacttcatcgaatcgctactggcaccgtggcgtgaagggcagttcagcaagcacttcaactggcagaaaattgaagcactgaaaccgttcggcggcattcgtatcgaagacaacgtggtgatccacgaaaacaacgtggaaaacatgacccgggatctgaaactggcgtgatggaaagctggttaattcctgcggcaccggtcacggtcgttgaagagatcaaaaagagccgcttcataacgatgttggcgcataccgatggcgttgaggcggcgaaagcgtttgttgaatcggtgcgggcagaacaccccgatgcccggcaccattgcgtggcgtgggtcgcgggtgcgccggatgattctcaacagctgggtttctctgacgacggggagccggcgggaacggcaggtaaaccgatgctcgcccagctaatgggcagcggcgtcggggaaattaccgctgtggtagtgcgctactacggcggcatattgcttggcaccggtgggttagtgaaagcgtatggcggcggcgtgaatcaggcgctgcgccagctaacgacccaacgcaagacgccattaaccgaatatactttgcaatgtgaatatcatcagttaaccggcattgaagcgttgctggggcagtgtgacggcaaaattatcaacagtgattatcaggcattcgttctgctgcgggtggcgcttccggcggcgaaagtggctgaattttccgcaaagctggcggattttagccgtggttcattgcaattgttagcgattgaagaataatccccacttcgttttgcagaactaaggaagcggcagagatgcattttcgcgccattacccgaatcgttggactactggtcatcttattttcagggaccatgattatccctgggctggtagcactcatctaccgggatggagcgggccgcgcttttacccagaccttttttgtcgccctcgccattggctctatgctgtggtggccgaaccgcaaagagaaaggcgaacttaaatcccgtgaggggtttctgatagtggtgctgttctggaccgtgctgggtagcgtcggtgcgctcccttttatcttctcggaaagcccgaacctcacgattaccgatgcgttttttgaatctttctctggcctgaccactacgggagccactacgctggtggggctggattcgctccctcacgccatcctcttttatcgccagatgctgcaatggtttggcgggatggggatcatcgtgttggcggttgcgatactgcctatcctcggcgtgggtgggatgcagctctatcgcgcagaaatgcccggcccgctgaaagataacaaaatgcgcccgcgaattgcggaaacggcgaaaaccctgtggttgatttatgtcttgctgaccgtcgcctgtgcgctggcgttgtggtttgccggaatggatgcctttgatgccatcggccatagctttgcgactatcgctattggcggcttctcgacacatgatgccagtatcggttatttcgatagcccgactattaacactatcattgctatcttcctgctgatctccggctgtaactacggtctgcacttttcactgttaagtgggcgtagtctgaaggtttattggcgcgatccggaatttcgcatgtttatcggcgtacagtttacgctggtggttatttgtaccctcgtactgtggtttcataatgtctacagttcggcgctgatgacaattaaccaggcgtttttccaggtggtgtcgatggcgacaaccgccgggtttacaactgacagcattgcccgctggccgctctttttgccggtactgcttttatgttcagcctttatcggcggttgcgccgggtcaacgggcggtggcctgaaggtgatccgcatcctgctgctgtttaagcaggggaaccgtgagctgaaacgactggtgcatccgaacgccgtctatagcattaagctggggaatcgcgcactgccggaacgtatcctcgaagccgtttggggatttttctccgcctatgcattggtgtttattgtcagtatgctggcgattatcgcacgggcgtggatgacttttctgcctttgcgtcggttgttgcgacattgaataacctggggccagggcttggcgtggttgctgataactttaccagtatgaacccggtggctaaatggatcctgattgccaacatgctgtttggtcgtctcgaggtctttacattgctggtgctctttaccccgactttctggcgtgaatgatggagtaatacgtgaaaacattaattcttttctcaacaagggacggacaaacgcgcgagattgcctcctacctggcttcggaactgaaagaactggggatccaggcggatgtcgccaatgtgcaccgcattgaagaaccacagtgggaaaactatgaccgtgtggtcattggtgcttctattcgctatggtcactaccattcagcgttccaggaatttgtcaaaaaacatgcgacgcggctgaattcgatgccgagcgccttttactccgtgaatctggtggcgcgcaaaccggagaagcgtactccacagaccaacagctacgcgcgcaagtttctgatgaactcgcaatggcgtcccgatcgctgcgcggtcattgccggggcgctgcgttacccacgttatcgctggtacgaccgttttatgatcaagctgattatgaagatgtcaggcggtgaaacggatacgcgcaaagaagttgtctataccgattgggagcaggtggcgaatttcgcccgagaaatcgcccatttaaccgacaaaccgacgctgaaataagcataaagaataaaaaatgcgcggtcagaaaattattttaaatttcctcttgtcaggccggaataactccctataatgcgccaccactgacacggaacaacggcaaacacgccgccgggtcagcggggttctcctgagaactccggcagagaaagcaaaaataaatgcttgactctgtagcgggaaggcgtattatgcacaccccgcgccgctgagaaaaagcgaagcggcactgctctttaacaatttatcagacaatctgtgtgggcactcgaagatacggattcttaacgtcgcaagacgaaaaatgaataccaagtctcaagagtgaacacgtaattcattacgaagtttaattctttgagcgtcaaacttttaaattgaagagtttgatcatggctcagattgaacgctggcggcaggcctaacacatgcaagtcgaacggtaacaggaagaagcttgcttctttgctgacgagtggcggacgggtgagtaatgtctgggaaactgcctgatggagggggataactactggaaacggtagctaataccgcataacgtcgcaagaccaaagagggggaccttcgggcctcttgccatcggatgtgcccagatgggattagctagtaggtggggtaacggctcacctaggcgacgatccctagctggtctgagaggatgaccagccacactggaactgagacacggtccagactcctacgggaggcagcagtggggaatattgcacaatgggcgcaagcctgatgcagccatgccgcgtgtatgaagaaggccttcgggttgtaaagtactttcagcggggaggaagggagtaaagttaatacctttgctcattgacgttacccgcagaagaagcaccggctaactccgtgccagcagccgcggtaatacggagggtgcaagcgttaatcggaattactgggcgtaaagcgcacgcaggcggtttgttaagtcagatgtgaaatccccgggctcaacctgggaactgcatctgatactggcaagcttgagtctcgtagaggggggtagaattccaggtgtagcggtgaaatgcgtagagatctggaggaataccggtggcgaaggcggccccctggacgaagactgacgctcaggtgcgaaagcgtggggagcaaacaggattagataccctggtagtccacgccgtaaacgatgtcgacttggaggttgtgcccttgaggcgtggcttccggagctaacgcgttaagtcgaccgcctggggagtacggccgcaaggttaaaactcaaatgaattgacgggggcccgcacaagcggtggagcatgtggtttaattcgatgcaacgcgaagaaccttacctggtcttgacatccacggaagttttcagagatgagaatgtgccttcgggaaccgtgagacaggtgctgcatggctgtcgtcagctcgtgttgtgaaatgttgggttaagtcccgcaacgagcgcaacccttatcctttgttgccagcggtccggccgggaactcaaaggagactgccagtgataaactggaggaaggtggggatgacgtcaagtcatcatggcccttacgaccagggctacacacgtgctacaatggcgcatacaaagagaagcgacctcgcgagagcaagcggacctcataaagtgcgtcgtagtccggattggagtctgcaactcgactccatgaagtcggaatcgctagtaatcgtggatcagaatgccacggtgaatacgttcccgggccttgtacacaccgcccgtcacaccatgggagtgggttgcaaaagaagtaggtagcttaaccttcgggagggcgcttaccactttgtgattcatgactggggtgaagtcgtaacaaggtaaccgtaggggaacctgcggttggatcacctccttaccttaaagaagcgttctttgaagtgctcacacagattgtctgatgaaaatgagcagtaaaacctctacaggcttgtagctcaggtggttagagcgcacccctgataagggtgaggtcggtggttcaagtccactcaggcctaccaaatttgcacggcaaatttgaagaggttttaactacatgttatggggctatagctcagctgggagagcgcctgctttgcacgcaggaggtctgcggttcgatcccgcatagctccaccatctctgtagtgattaaataaaaaatacttcagagtgtacctgcaaaggttcactgcgaagttttgctctttaaaaatctggatcaagctgaaaattgaaacactgaacaacgaaagttgttcgtgagtctctcaaattttcgcaactctgaagtgaaacatcttcgggttgtgaggttaagcgactaagcgtacacggtggatgccctggcagtcagaggcgatgaaggacgtgctaatctgcgataagcgtcggtaaggtgatatgaaccgttataaccggcgatttccgaatggggaaacccagtgtgtttcgacacactatcattaactgaatccataggttaatgaggcgaaccgggggaactgaaacatctaagtaccccgaggaaaagaaatcaaccgagattcccccagtagcggcgagcgaacggggagcagcccagagcctgaatcagtgtgtgtgttagtggaagcgtctggaaaggcgtgcgatacagggtgacagccccgtacacaaaaatgcacatgctgtgagctcgatgagtagggcgggacacgtggtatcctgtctgaatatggggggaccatcctccaaggctaaatactcctgactgaccgatagtgaaccagtaccgtgagggaaaggcgaaaagaaccccggcgaggggagtgaaaaagaacctgaaaccgtgtacgtacaagcagtgggagcacgcttaggcgtgtgactgcgtaccttttgtataatgggtcagcgacttatattctgtagcaaggttaaccgaataggggagccgaagggaaaccgagtcttaactgggcgttaagttgcagggtatagacccgaaacccggtgatctagccatgggcaggttgaaggttgggtaacactaactggaggaccgaaccgactaatgttgaaaaattagcggatgacttgtggctgggggtgaaaggccaatcaaaccgggagatagctggttctccccgaaagctatttaggtagcgcctcgtgaattcatctccgggggtagagcactgtttcggcaagggggtcatcccgacttaccaacccgatgcaaactgcgaataccggagaatgttatcacgggagacacacggcgggtgctaacgtccgtcgtgaagagggaaacaacccagaccgccagctaaggtcccaaagtcatggttaagtgggaaacgatgtgggaaggcccagacagccaggatgttggcttagaagcagccatcatttaaagaaagcgtaatagctcactggtcgagtcggcctgcgcggaagatgtaacggggctaaaccatgcaccgaagctgcggcagcgacactatgtgttgttgggtaggggagcgttctgtaagcctgtgaaggtgtgctgtgaggcatgctggaggtatcagaagtgcgaatgctgacataagtaacgataaagcgggtgaaaagcccgctcgccggaagaccaagggttcctgtccaacgttaatcggggcagggtgagtcgacccctaaggcgaggccgaaaggcgtagtcgatgggaaacaggttaatattcctgtacttggtgttactgcgaaggggggacggagaaggctatgttggccgggcgacggttgtcccggtttaagcgtgtaggctggttttccaggcaaatccggaaaatcaaggctgaggcgtgatgacgaggcactacggtgctgaagcaacaaatgccctgcttccaggaaaagcctctaagcatcaggtaacatcaaatcgtaccccaaaccgacacaggtggtcaggtagagaataccaaggcgcttgagagaactcgggtgaaggaactaggcaaaatggtgccgtaacttcgggagaaggcacgctgatatgtaggtgaagcgacttgctcgtggagctgaaatcagtcgaagataccagctggctgcaactgtttattaaaaacacagcactgtgcaaacacgaaagtggacgtatacggtgtgacgcctgcccggtgccggaaggttaattgatggggttagccgcaaggcgaagctcttgatcgaagccccggtaaacggcggccgtaactataacggtcctaaggtagcgaaattccttgtcgggtaagttccgacctgcacgaatggcgtaatgatggccaggctgtctccacccgagactcagtgaaattgaactcgctgtgaagatgcagtgtacccgcggcaagacggaaagaccccgtgaacctttactatagcttgacactgaacattgagccttgatgtgtaggataggtgggaggctttgaagtgtggacgccagtctgcatggagccgaccttgaaataccaccctttaatgtttgatgttctaacgttgacccgtaatccgggttgcggacagtgtctggtgggtagtttgactggggcggtctcctcctaaagagtaacggaggagcacgaaggttggctaatcctggtcggacatcaggaggttagtgcaatggcataagccagcttgactgcgagcgtgacggcgcgagcaggtgcgaaagcaggtcatagtgatccggtggttctgaatggaagggccatcgctcaacggataaaaggtactccggggataacaggctgataccgcccaagagttcatatcgacggcggtgtttggcacctcgatgtcggctcatcacatcctggggctgaagtaggtcccaagggtatggctgttcgccatttaaagtggtacgcgagctgggtttagaacgtcgtgagacagttcggtccctatctgccgtgggcgctggagaactgaggggggctgctcctagtacgagaggaccggagtggacgcatcactggtgttcgggttgtcatgccaatggcactgcccggtagctaaatgcggaagagataagtgctgaaagcatctaagcacgaaacttgccccgagatgagttctccctgactccttgagagtcctgaaggaacgttgaagacgacgacgttgataggccgggtgtgtaagcgcagcgatgcgttgagctaaccggtactaatgaaccgtgaggcttaaccttacaacgccgaaggtgttttggcggattgagagaagattttcagcctgatacagattaaatcagaacgcagaagcggtctgataaaacagaatttgcctggcggcagtagcgcggtggtcccacctgaccccatgccgaactcagaagtgaaacgccgtagcgccgatggtagtgtggggtctcctcatgcgagagtagggaactgccaggcatcaaataaaacgaaaggctcagtcggaagactgggcctttcgttttatctgttgtttgtcggtgaacgctctcctgagtaggacaaatccgccgggagcggatttgaacgttgcgaagcaacggcccggagggtggcgggcaggacgcccgccataaactgccaggcatcaaattaagcagaaggccatcctgacggatggcctttttgcattggcgcagaaaaaaatgccggatgcgacgctggcgcgtcttatccagcctactcttgcttatccgttctgcttttgcatccactccaccacaaaatcagccagcccctcaacatcattaatatccagtaatgcgacatcaagattaagcggcacatcactggctacagcaataacatgcctgtctatcactaattcttcaggtcgatgtccggctccatcgcgaaacagcacaatctttgcgatctcttcatgcttaaacccttcgaccagaatcaaatccagctttgaggtatccattcgacttgcgagaaactgtagatccagctcttcttcgtctggtgtttccgtcatcaaggcccatcgttgctggctggcaacgatggtttgtgccgcgccagccttgcgcagctcatagctatctttgcctggcttatcaacatccatatcatggtgcgtatgcttaatcagccctggacggatccctctggcgcataatgccgggatcagttttttcaaaagcgtagtttttccggtaccactccacgcggcaaaggcgagtaacggtatcatcgtttttcctgccatcgggcaagctcctctggcgtattcacgttaacaaatgcatctttatgatcgctgaaatcaaccgcatgaccgccagccagacgcataaataccattacccggcgttctcctgcttgcagatattccagtaataaaggctcaatagcgcggtttaccagagcaatagtcgggtgatcgcgttcaccgtcatggacccacacgacaggcgcatctttgcgctgatgattaagcctggctgctaaatcagggggaatgtaaggcgtatcgcacgggcaaaacaaaaaccactcaccagcttcctgctgcattactgaaagcattcctgccagagggcctgggtaatccgccagtgaatcttcaatcactttcagaccgcttgcctgatagatttcctgatgacgattagcattaaccacgacgtgagagagctgcgtcataagcgcgtcagcgacatgttgccataatggtttgccgtttaattcaagcaatcctttatctacgccgcccattcgtctggctttaccgcctgccagcacaacgcctgttatcgtcgtcatcagattcaccgatatcgcctcttttattgtgggattgaccctgctaacgtgtctgtctcaagagtaaggagcatcactatgaaatgtaaacgtctgaatgaagttattgaactcctccagccagcctggcaaaaagagccagaccttaacctgctgcaatttttgcagaaactggcgaaagagtcaggttttgacggcgaactggcggatttgacggatgacattctgatctatcacctgaaaatgcgtgattccgcgaaagatgcggtgatcccgggtttgcagaaagattatgaagaagacttcaaaacggcgctgttacgcgctcgcggcgtaattaaagagtaaaagcttgtaagcggcgccaccaaaatcatcgtgaaatgataatccttcgtcattcgtaatgttttccggatgatgggatgaataacagcgcttttactttccagacactacacccggataccatcatggacgctctgtttgagcatgggatccgggtggattccggtcttaccccgcttaacagctatgaaaaccgtgtctatcaatttcaggacgaagatcgtcgacgttttgtcgtcaaattttatcgccctgaacgttggacagccgatcaaatcctcgaagaacatcaatttgcgttgcagctggtaaatgatgaagttccggtcgcagcacctgtggcctttaacggtcagactttattgaatcatcagggattttatttcgctgtttttccaagcgtcggtggtcgccagttcgaagctgataatatcgatcagatggaagcggttgggcgttatttagggcgtatgcaccagacggggcgcaaacagctttttatccatcgcccgaccatcggtttgaacgaatatctcattgagccacgcaagctgtttgaggacgctacactgataccttccgggttgaaagcggcattcctgaaagcgacagatgagctgattgccgccgttacagcacactggcgggaagatttcaccgttctgcggctacatggagactgccacgccgggaatattctctggcgcgatggtccaatgtttgttgatctggatgatgcacgtaatggtccagccgttcaggatttgtggatgttgctcaatggcgataaagccgagcagcggatgcaactggaaactattattgaagcttatgaagaatttagcgagttcgacaccgctgaaatcggactgattgaacctttacgcgccatgcgtttggtttattatcttgcctggctaatgcggcgttgggctgatcccgcgttcccgaaaaatttcccgtggttaaccggggaagattactggctgcgacagacggcgacttttatagaacaggcaaaagttctacaagaaccccctttgcaattaacacctatgtattaatcggagagagtagatcatgaaaaagatttggctggcgctggctggtttagttttagcgtttagcgcatcggcggcgcagtatgaagatggtaaacagtacactaccctggaaaaaccggtagctggcgcgccgcaagtgctggagtttttctctttcttctgcccgcactgctatcagtttgaagaagttctgcatatttctgataatgtgaagaaaaaactgccggaaggcgtgaagatgactaaataccacgtcaacttcatgggtggtgacctgggcaaagatctgactcaggcatgggctgtggcgatggcgctgggcgtggaagacaaagtgactgttccgctgtttgaaggcgtacagaaaacccagaccattcgttctgcttctgatatccgcgatgtatttatcaacgcaggtattaaaggtgaagagtacgacgcggcgtggaacagcttcgtggtgaaatctctggtcgctcagcaggaaaaagctgcagctgacgtgcaattgcgtggcgttccggcgatgtttgttaacggtaaatatcagctgaatccgcagggtatggataccagcaatatggatgtttttgttcagcagtatgctgatacagtgaaatatctgtccgagaaaaaataattcaatgtaaattacataaagcccgtgagtattcacgggcttttttattatttaataaatataaatacattctgataatgcatcctgccgctggacattatttcagcataagtggatattcaaagttttgctgttttatcagggaatatttatatgatacgtaagtcagctacaggtgttattgttgcgttagccgtaatctggggtggtggcacatggtacacaggtacgcaaattcagcctggtgtcgaaaaatttattaaagattttaacgatgctaaaaagaaaggtgaacatgcctacgatatgacgttaagttatcaaaattttgacaaaggcttttttaattcccgttttcaaatgcaaatgacattcgataacggtgcacccgatctcaatatcaagccaggccagaaagttgtatttgatgtggatgttgagcacggtccgttgcccatcacaatgttaatgcatggtaatgtcatcccagcactggcagcggcaaaagtgaacttagtgaataatgaactgacacaaccgctatttatcgccgcgaaaaataaatcgcccgtggaagcgacattgcgattcgcgtttggtggctcattctctacgacattagatgttgcccctgcagagtatggaaagttttcttttggtgagggccagtttacttttaatggtgatggtagttcattgtctaacctggatattgaaggcaaagtcgaagatattgttctgcaattatcaccaatgaacaaagtaacggcaaaaagttttaccattgattctctggcgcgattagaagaaaagaaatttccggttggtgaaagcgagtcgaaatttaatcagattaacattatcaatcacggggaagacgttgcccaaatcgatgctttcgttgcaaaaaccaggctggatcgcgttaaagacaaagattatatcaatgtcaatctcacctacgaacttgataagttaacaaaagggaatcagcaactcggtagtggtgagtggtcattgattgctgaatctattgatccctcagcagtgcgccaatttatcatccagtataacattgcgatgcagaagcagcttgctgcacaccctgagttagcaaacgatgaagttgctctgcaagaagtgaatgctgcattgttcaaagagtatttaccgttattacaaaaaagtgagccgaccattaaacaaccggtaagatggaagaacgcactcggcgaactaaatgccaatctggatatcagtattgccgacccagccaaatcttcatcatccacaaacaaagatatcaaatcgctcaattttgatgtgaagttaccgcttaatgtcgtcacagaaaccgcaaaacagcttaatttatctgaaggaatggatgcggaaaaagcgcaaaagcaggctgataaacaaatcagcgggatgatgacattaggtcagatgtttcagttaatcacgattgacaacaataccgcctcgctgcagctgcgttatacaccgggtaaagttgtttttaacggacaggagatgagcgaagaagaatttatgtctcgtgccggacgttttgttcattaaaatactcactcgcctctgctcattcagaggcgagtaaaacttacttattctgacgctgtgatgacatgagagacgtcagaagccggtctttttcctgccacaatgagttcagccattgctgaaaatggcgcttaaagcttttgtcattgatgtagtcgccatgtaactcatcggcaataggctgtaaatccacatgtacgacaatccgcgtcagtttaccgcttaacatatcgaagaacggctgacggttattgtccggataacacagcgtaacattaagcagtttatcgaattgtttacccagtacatttagcgccatcgcaatgcctgccgcctttggtggcaacaagttttgaaaagtggagtgggtttgctgatgtttttcttgcgtgaaacgggagccttcaacgaaattgacaatggtggtgggatgcaggcgaaacttttcacaagaacgccgagtggtttcaacatctttaccacgtcgctccggatgacgtaataaataagcgcgggaataacgcttcataaacggcatatccagcgaccagcacgccaggccaagaaatggcacccaggccagctgttgcttgaggaaatatttattcatcggaatgtgcttacgaaacagcacgcacagtacgacaatatctgcccaactacggtggttacaaataagcagataccagttcttcttacttaacccttccagcccgtgaacttcccattgaaggtgtgggttcagatgcagtaataccgccagaccttcacaccagcaatacatcataaaatcacaaaaacgcgaaacctttcgccaaatgactggcacaggtagcaatagttttacaatcccggcaatgatgatcgggacggaacaaaaaatagtgaccaaaatggtcaatacgatactcagcaaaagggttatcgcagcgagtattctcgtcataatgaatttattcaaaaggttagccatagacagtgcgctaaagaagcgcaaggcgcagattttagcagaaaacgacccaaataacggatgatccttaaggagaaaaataattcatatctatccacattagaaaaaatcccattatctcaattattagggatggatttatttttaactgcatgaaaaacaaagacaaacatcatgctgtaaaaagcatgataataaattaaaagcgatgtaaataatttatgcacaaagttatccacatgacgatttgcgagcgatccagaagatctacaaaagattttcacgaaaagcggtgaaaaactcatgttttcatcctgtctgtggcatcctttacccataatctgataaacaggcacggacattatggttcagatcccccaaaatccacttatccttgtagatggttcatcttatctttatcgcgcatatcacgcgtttcccccgctgactaacagcgcaggcgagccgaccggtgcgatgtatggtgtcctcaacatgctgcgcagtctgatcatgcaatataaaccgacgcatgcagcggtggtctttgacgccaagggaaaaacctttcgtgatgaactgtttgaacattacaaatcacatcgcccgccaatgccggacgatctgcgtgcacaaatcgaacccttgcacgcgatggttaaagcgatgggactgccgctgctggcggtttctggcgtagaagcggacgacgttatcggtactctggcgcgcgaagccgaaaaagccgggcgtccggtgctgatcagcactggcgataaagatatggcgcagctggtgacgccaaatattacgcttatcaataccatgacgaataccatcctcggaccggaagaggtggtgaataagtacggcgtgccgccagaactgatcatcgatttcctggcgctgatgggtgactcctctgataacattcctggcgtaccgggcgtcggtgaaaaaaccgcgcaggcattgctgcaaggtcttggcggactggatacgctgtatgccgagccagaaaaaattgctgggttgagcttccgtggcgcgaaaacaatggcagcgaagctcgagcaaaacaaagaagttgcttatctctcataccagctggcgacgattaaaaccgacgttgaactggagctgacctgtgaacaactggaagtgcagcaaccggcagcggaagagttgttggggctgttcaaaaagtatgagttcaaacgctggactgctgatgtcgaagcgggcaaatggttacaggccaaaggggcaaaaccagccgcgaagccacaggaaaccagtgttgcagacgaagcaccagaagtgacggcaacggtgatttcttatgacaactacgtcaccatccttgatgaagaaacactgaaagcgtggattgcgaagctggaaaaagcgccggtatttgcatttgataccgaaaccgacagccttgataacatctctgctaacctggtcgggctttcttttgctatcgagccaggcgtagcggcatatattccggttgctcatgattatcttgatgcgcccgatcaaatctctcgcgagcgtgcactcgagttgctaaaaccgctgctggaagatgaaaaggcgctgaaggtcgggcaaaacctgaaatacgatcgcggtattctggcgaactacggcattgaactgcgtgggattgcgtttgataccatgctggagtcctacattctcaatagcgttgccgggcgtcacgatatggacagcctcgcggaacgttggttgaagcacaaaaccatcacttttgaagagattgctggtaaaggcaaaaatcaactgacctttaaccagattgccctcgaagaagccggacgttacgccgccgaagatgcagatgtcaccttgcagttgcatctgaaaatgtggccggatctgcaaaaacacaaagggccgttgaacgtcttcgagaatatcgaaatgccgctggtgccggtgctttcacgcattgaacgtaacggtgtgaagatcgatccgaaagtgctgcacaatcattctgaagagctcacccttcgtctggctgagctggaaaagaaagcgcatgaaattgcaggtgaggaatttaacctttcttccaccaagcagttacaaaccattctctttgaaaaacagggcattaaaccgctgaagaaaacgccgggtggcgcgccgtcaacgtcggaagaggtactggaagaactggcgctggactatccgttgccaaaagtgattctggagtatcgtggtctggcgaagctgaaatcgacctacaccgacaagctgccgctgatgatcaacccgaaaaccgggcgtgtgcatacctcttatcaccaggcagtaactgcaacgggacgtttatcgtcaaccgatcctaacctgcaaaacattccggtgcgtaacgaagaaggtcgtcgtatccgccaggcgtttattgcgccagaggattatgtgattgtctcagcggactactcgcagattgaactgcgcattatggcgcatctttcgcgtgacaaaggcttgctgaccgcattcgcggaaggaaaagatatccaccgggcaacggcggcagaagtgtttggtttgccactggaaaccgtcaccagcgagcaacgccgtagcgcgaaagcgatcaactttggtctgatttatggcatgagtgctttcggtctggcgcggcaattgaacattccacgtaaagaagcgcagaagtacatggacctttacttcgaacgctaccctggcgtgctggagtatatggaacgcacccgtgctcaggcgaaagagcagggctacgttgaaacgctggacggacgccgtctgtatctgccggatatcaaatccagcaatggtgctcgtcgtgcagcggctgaacgtgcagccattaacgcgccaatgcagggaaccgccgccgacattatcaaacgggcgatgattgccgttgatgcgtggttacaggctgagcaaccgcgtgtacgtatgatcatgcaggtacacgatgaactggtatttgaagttcataaagatgatgttgatgccgtcgcgaagcagattcatcaactgatggaaaactgtacccgtctggatgtgccgttgctggtggaagtggggagtggcgaaaactgggatcaggcgcactaagattcgcctgaacatgccttttttcgtaagtaagcaacataagctgtcacgttttgtgatggctattagaaattcctatgcaacaactgaaaaaaaattacaaaaagtgctttctgaactgaacaaaaaagagtaaagttagtcgcgtagggtacagaggtaagatgttctatctttcagaccttttacttcacgtaatcggatttggctgaatattttagccgccccagtcagtaatgactggggcgttttttattgggcgaaagaaaagatccgtaatgcctgatgcgctatgtttatcaggccaacggtagaattgtaatctattgaatttacgggccggatacgccacatccggcacaagcattaaggcaagaaaattattcgccgtcctgcgtttcttctacaggctgcatctcgctaaaccaggtatccagtttctgccgcagcttgtccacgccttgtttcttcaacgaagaaaacgtttcaacctgcacatcaccgttaaacgccagtacagcttcacgcaccatattcaattgcgctttacgtgcgccgcttgccagtttgtccgctttggtcagcagcaccagaacggcgatattgctgtctaccgcccactcaatcatctgctgatccaaatctttcagcggatggcgaatatccattagcaccaccagaccttgcaggctctgacgtttttcgaggtattcgccgagcgcacgctgccatttgcgcttcatctcttccgggacttccgcataaccgtacccaggcaagtcaaccagacgcttgccgtcagccacttcaaacaggttgataagctgggtgcgccctggggtttttgaggtacgagccaggcttttctggttagtcagcgtgttcagcgcgctggatttacctgcgttggaacggcctgcaaaagccacttcaattccggtatcggaaggtaggtggcgaatatcaggcgcactcatcacaaaatgcgtctgttgataattcaaattagtcaaagcggtcgtctccgtcagtcaaagctttgtggcgattatacctgaaccataataaaaggcggatttttcggcgtgagcgttgtaagtaaaagccatacgctttgtgagacattgccgatagtctttatgcgaaatagcagagaaaattctgcgatgcatgtcaaataagctatataaatcagtgaattgcttttatataaaactctgaaaatgtgcaaatactgatggcggttgattgtttgtttaaagcaaaggcgtaaagtagcacccatagagcgaggacgctaacaggaacaatgactcaggatgagggtcaggagcgccaggaggcgaagacagaggattgtcaggaagacaaacgtccggagacgtaattaaacggaaatggaatcaacacggattgttccggctaaaggaaaaacagggtgtgttggcggcctgcaaggattgtaagacccgttaagggttatgagtcaggaaaaaaggcgacagagtaatctgtcgccttttttctttgcttgctttctgttagattccgccgcaaatctatactgaataaaacggctaaaagacgaaccattatgaaaccatcatcttcaaactcacgcagcaaaggtcatgcaaaagcgcgtcgaaaaacacgcgaggagctggatcaggaagctcgtgatcgcaagcgtcagaaaaaacgtcgtggtcatgcgccgggcagccgcgcagcgggcggaaacaccacgtcaggcagcaaaggccagaacgcaccaaaagatccacgtattggcagtaaaacccctattccattgggcgtgactgaaaaagtcaccaaacagcacaaaccgaagagtgagaaacctatgctttcaccgcaggcggagttggaattactggaaacggatgagcgtctggatgcgctgctggaacgtctggaagcaggcgaaaccctgagtgccgaagagcaatcctgggtggatgctaaactggatcgtattgatgagttgatgcagaaactcggcctctcttatgacgatgacgaagaagaggaagaagacgagaagcaagaagacatgatgcgtctgctgcggggcaactaacggattgccgccgtgggccttcccgttctgctgataacccttccggttatatgttatctggtgtggttattcgttaaactacagcggttgtcgcggcgacaaaagtggctgcgcaaccggctgatgacccgaaacgggcatccgccggtacgccgtagccgccagagacgccatcggaaggagtgagcatgtctgtacagcaaatcgactgggatctggccctgatccagaaatataactattccgggccacgatacacctcgtacccgaccgcgctggagttttcagaagacttcggcgaacaggcgtttttacaagccgtggcgcgctatcctgagcgtccattatctctctacgtacatatcccgttctgccataagctttgttacttctgcggttgcaataagattgttactcgccagcagcacaaggccgatcagtatctggacgcgctggagcaagaaatcgtccatcgtgcaccgctgttcgccgggcgtcacgtcagccaattgcactggggcggcggaacgccgacgtatctgaataaagcgcaaatcagccgcctgatgaagctgctgcgcgaaaacttccagttcaatgccgatgcggagatttcgatcgaagtcgatccgcgggaaatcgaactggatgtactcgatcatttacgcgccgaaggctttaatcgcctgagcatgggcgtgcaggacttcaacaaagaagtgcaacgtctggttaaccgcgagcaggatgaagagttcatctttgcactgcttaaccatgcgcgtgagattggttttacctccaccaacatcgacctgatttacggcctgccgaaacagacgccggagagtttcgcctttaccctgaaacgtgtggcggagctgaaccccgatcgtctgagtgtctttaactacgcgcatctgccgaccatttttgctgctcagcgcaaaatcaaagatgctgacctgccgagtccgcagcaaaaactcgatatcctgcaggaaaccatcgccttcctgacgcaatcgggctatcagtttatcggtatggatcactttgcccgtccggatgacgagctggcggtggcccagcgtgaaggcgtgctgcatcgtaacttccagggctacaccactcagggcgataccgatctgctggggatgggcgtttccgccatcagcatgattggcgactgctacgcgcagaaccagaaagagttgaagcagtactatcagcaagtggatgaacaaggcaatgcgctgtggcgtggtattgcgctaacgcgtgatgactgtattcgccgcgatgtgattaagtcgctcatctgcaacttccgtctggattacgcccctattgagaaacagtgggatttgcacttcgctgattactttgcggaagatctcaagctgctcgccccgttagcaaaagatgggctggtggatgtggatgagaagggaatacaggtgacggcgaaaggtcgcttgctgatccgcaacatttgcatgtgctttgatacctatctgcgccagaaagcgcggatgcagcagttctctcgggtgatttaaatagtgaatggcgcttcgtttacaaagtagaaaacgaaagcgccatcaatgtgctgagaacaagattgcctgatgcgctgggcaacaaaacctgttgaaattattgcttttgtaggccggataaggcgtttacgccgcatcaggccatctgagcatgatgcctgatgcggcgtggtcgcgtcttatcaggcctacgactttctccgcatccggcataaacaacgagcttcagctaaacagcccaatcattgcggcacacagcacggcagcaacggcagtttgcggtgtgtggctgtcaactgcgccactcgataccagattaattattgattccagcataatgactctccccgttttccgggcaagatcatactgaacttatcggaacagtaaagcgtaaaataccagcaatttgcgctcaataatcaatctttacacacaagctgtgaatcactccatccccagctcttttaacttacgcgtcagggtgttgcggccccagccgagtagccgcgccgcttcctgtttatgcccctgcgtatgtcgcaacgcggtcgtcagtaacgtccgctccagctctggctgcgcttcggaaagcagattttgatgaccggaacgcagcgctctgtctgcccactgcgcaagaagcgtcgcccagctgtccggttgcatttgcgaagtactctccgcaaccgttgattcaaacagttcgccgggcaaatcctgaatcaacacttcctgcccggcggccatcaccgttagccagcggcaggtgttttccagctggcgcacgttgcctggccacgccagacgcgtcagagcagcttcggtttccggatgcagtaacttcgcttctacgcccagttcgcgcgcggcaacctgtaaaaaatggcgcgccagacggggaatatcttcccgacgttcgcgcagcggcggcagatgaacgcggataacgttcaggcggtggaacagatcctcacggaacttaccttcctgcactcgctgttcgagattctggtgagtggcagcgataatccgcacatccactttcaccggcgcatagccgccaacgcggtaaaactgaccgtctgccagcacgcgcagcaaacgcgtctgcacatccagcggcatatcaccaatttcgtcgaggaataatgtaccgccatcggcctgttcaaaacgcccctgacgaatggtattcgcgccagtaaacgcgcctttctcgtggccaaacagttctgattcgatcaaatcttttgggatagctgccatattcagcgcgataaacggcgctttggcgcgcggactgtggcgatgcagggcatgagcgaccagttctttaccggtgccggattcgccgttaatcagcacgctaatagaagaacgcgaaagccgaccgataatacggaacacgtcctgcatggctggcgcttcgccgatgatatcggtcgttgggccgttaagctgaacattacgcggctgctgctgttcctggtaatgactgatagcgcgctcaaccagcgccactgcttcgtcgatatcaaacggtttgggcagataatcaaacgccccttgttgataggcgctgacggcagcatccagatcggaatgtgcggtcataatgatgaccggaagcattggatggcgctgtttaatctgcttgagcagcgccagcccgtccattcccggcatacggatatctgaaagcagcacatccggcgttttgctcgccagcgcctccagcacttctgcgccgttctcaaacgtcgtacaggttaaacctgccccagcgagcgcacgttcaagcacccaacggatggaactatcgtcatcgactacccagactatccctcgttgcataaacgtcacctttatttcctgataggcaggtaaaccgagaactcggtatgccctggccaactggtaaattcaattttgcctgaatgctgatcaatcaaattacgagcgatggataagccaagcccggtgccaccttcgcggccgctgaccatcgggtaaaacagcgtatcctgcaaatgaggcggaatgcccggcccgttatcttccacatcaatccgcgccgccagccggtagcgctcgccgtgtaaggtcagttgaaacgcggtgcgggtacgcagaatgatttcaccgccttccggccccagcgcctgtagcgcattgcgcacaatattcagcaagacctgttcaatttgatccgggtcgtgcgccagttccggtaggctgggatcgtaatcacgaatcaaccgcacgttgtccggcagttccatcgacaccagcgttaccacgcgttcagccactttgtgaatactttcggtaacgcgcgtaccgggcagctgcggccccaacagacggtcgaccagatttcgcagccggtccgcctgttcgataatcactttggtatattcgagtagtgatgggtcaggtaacgctttgctgagcagctgcgccgcgccacgtaaaccgccaagcggatttttaatctcatgtgccaggccgcgcactaaatcacgggcagcaacctgctgggcgtgctgtagctgttcctgacttaagcggcgctggttatccatcggagccatctccagcaggatcatgccgtccggcatacgctgggccgtcacagaaaggatatgcgagcgcccgtcgatgaccagcgtcacttcgttatcggtaaaaccttgccccgcctccagactttcttgcatcagctcgatatttaatgagaagtagctcaacagttccggtaacggtgtaccaaacaatttgcgggagctttgggcgagcagttgttgcgcggcagggttggcgtaatggatcgccaggttgtcatcgattaacaaaatactgttaatcagcgagttgaggatctgcccagcatcgggctgcgtgcctgttgccataaagcagtctcctgaacaggttgcaccattttagtgcattatagctttttacggataaaaagcgcgaagcatcagagaattgacggagaaaaaagcccatgcagagatgggctacagatagctgacaaacttcacgttggagagcgactcacctgctccggcctaccacatcatcaccgtgtaggccggataagacgcatttgcgtcgcatccggcgtgatgtgcttgccaccgatcccaggcctgccagagacaggcgaaaagtttccacggcaactaaaacacttagacgctgtagtacagctcaaactctaccggatgcggagtcatacgcacgcggtcatcttcttcgcgacgcagagcgatgtacgcatcaattgcttcgtcagtgaacacgccaccggctttcaggaactcgcggtccagatccagttcgttcagtgcttcttccagagagcctgcaacctgtgggatctctttcgcttcttctggcggcaggtcatacaggtttttgtccatggcttcgcccggatggatcttgttcttgataccatcaagaccggccatcagcagggcagcaaagcacaggtacgggttagctgccggatccgggaaacgtacttcgatacgacgtgctttcggagaagaaaccaccggaatacggatagacgcagaacggttacgcgcagagtaagccagcattaccggtgcttcatagcccgggaccagacgcttataagagttggtggtcgggtttgccagggcgttaatcgctttagcgtgtttgattacgccgccaatgtagtacagcgcctgctcagacagacctgcgtatttgtcgcctgcgaacaggttaacgccgtttttagacagagacatgtggcagtgcataccggagccgttatcaccgaacatcggttttggcataaaggtcgcggttttaccgaagcggtgcgctacgttgtgcacaacatatttgtagatctgaatttcgtcagcttttttggtcatggtattgaagcgggtagccacttcgttctgaccagcagtcgctacttcgtggtgatgggcttcaaccaccagacccatctgttccatcaccagacacatttcagaacgaatatcctgagccgagtctaccggtggaaccgggaagtaaccgcctttcactgccggacggtgacctttgttaccaccttcgtattgggtggaggagttccatgcgccttcgatatcgtcgatagcaacgtgggaaccggagatagatgatccgaaacggatgtcatcgaacaggaagaattcaggttctggcccgaacagtacggtgtcggcaatgccagtggaacgcaggtaatcttcggcgcgcttcgcaatggagcgcgggtcacggtcatagccttgcagggtgccaggttcaaggatgtcgcaacggataatcagggtggagtcggcgaagaacgggtcaatcactgcggtggatgcgtctggcatcagcaccatgtcggactcgttaatgcctttccagccgccaatcgaggagccgtcaaacattttgccttcttcgaagaattcagcattcacctgatgagcagggatagtgacgtgctgttctttacctttagtatcggtgaagcgcaaatcaacaaacttcacttcgtgctcgttcagcatcgtcagtacgtgttcagcggacatactttaactctcctggattggtcatggtcgtcgtggtaacgaaatctgcaattattttggccgtgtcgccgtaaaaaagataaagcgaaatctgtgccaacttttaaattgcccctaaaaggcgttatcatgcgcaccatcgtgcaaaagggctgcaccacgatgtgaatgttgcaccaatatagtgcttcaatggaaacattaagcaccatgttggtgcaatgacctttggataaccctttttatgctccgtgaaagcgatcacaaagggactctgcaatacttgtttgcggaggatgtttgtgatcctgttttgtagtgcgattaatccgtgtacaataacgcgctatttctaatgcctgaggcaaagttgtgatcgaaaaattgcgtaatatcgccatcatcgcgcacgtagaccatggtaaaaccaccctggtagacaagctgctccaacaatccggtacgttcgactctcgtgccgaaacccaagagcgcgtgatggactccaacgatttggagaaagagcgtgggattaccatcctcgcgaaaaacaccgctatcaaatggaatgattaccgtatcaacatcgttgataccccggggcacgccgacttcggtggtgaagttgaacgtgtaatgtccatggtagactcagtgctgctggtggttgacgcatttgacggcccgatgccgcaaacgcgcttcgtaaccaaaaaagcgtttgcttacggcctgaagccgattgttgttatcaacaaagttgaccgccctggcgcgcgtcctgattgggttgtggatcaggtattcgatctgttcgttaacctcgacgcgaccgacgagcagctggacttcccgatcgtttacgcttctgcgctgaacggtatcgcgggtctggaccacgaagatatggcggaagacatgaccccgctgtaccaggcgattgttgaccacgttcctgcgccggacgttgaccttgacggtccgttccagatgcagatttctcagctcgattacaacagctatgttggcgttatcggcattggccgcatcaagcgcggtaaagtgaagccgaaccagcaggtcactatcatcgatagcgaaggcaaaacccgcaacgcgaaagtcggtaaagtgctgggccacctcggtctggaacgtatcgaaaccgatctggcggaagctggcgatatcgttgcgatcacgggccttggcgaactgaacatttctgacaccgtttgcgacacgcaaaacgttgaagcgctgccggcactctccgttgatgagccgaccgtttctatgttcttctgcgttaacacctcgccgttctgcggtaaagaaggtaagttcgtaacgtctcgtcagatcctggatcgtctgaacaaagaactggtacacaacgttgcgctgcgcgtagaagaaaccgaagacgccgatgcgttccgcgtttctggtcgtggcgaactgcacctgtctgttctgatcgaaaacatgcgtcgtgaaggtttcgaactggcggtatcccgtccgaaagttatcttccgtgaaatcgacggtcgtaaacaagagccgtatgaaaacgtgactctggacgttgaagaacagcatcagggttctgtaatgcaggcgctgggcgaacgtaaaggcgacctgaaaaacatgaatccagacggtaaaggccgcgtacgtctcgactacgtgatcccaagccgtggtctgattggcttccgttctgagttcatgaccatgacttccggtactggtctgctgtactccaccttcagccactacgacgacgtacgtccgggtgaagtgggtcagcgtcagaacggcgtactgatctctaacggtcagggtaaagcggtcgcgttcgcgctgttcggtctgcaggatcgcggtaagctgttcctcggtcacggtgcagaagtttacgaaggtcagattatcggtattcatagccgctctaacgacctgactgtaaactgcctgaccggtaagaaactgaccaacatgcgtgcttccggtactgacgaagccgttgttctggttccgcctatccgcatgactctggaacaagctctggagttcatcgatgatgacgaactggtagaagtgactccgacctctatccgtattcgtaaacgtcactgacggaaaacgatcgtcgccgcgccaaccgcgcaccgaaagacgattaatttcgttttttagtcataaaaaacctgccagcgatggcaggtttttttttgcctgtcgtgagcgcacaccaatgcgagtatctcccttataagtctgtggttacgtcaatagagagctttgtcacaattatctgcaaagtcatacgccgttaattgctttcttttttggcgtaagcgtaagatgcttcatctggtttaaaccaaaaggattaaacaatggcggagaatcaatccaccgtagaaaatgcaaaagagaaactggatcggtggttgaaagatggcatcaccacgccgggtggaaaactcccttcagaaagagagctgggagaactgctgggcattaaacgtatgacgctgcgccaggcgttgttgaacctcgaggcagaatccaaaatcttccgtaaggatcgtaaggggtggttcgtgacccagccgcgatttaattacagtccggagctgtcggcgagctttcagcgggccgcaattgagcaagggcgagagccttcctgggggtttaccgagaaaaaccgtaccagcgatattcccgagacgctcgcgccactgattgcagtgacgccatcaactgaactctatcgcatcaccggctggggggcgctggaaggacataaagttttctatcacgaaacatatattaatcctgaagttgctccgggctttattgaacaacttgaaaaccactcattttctgcagtctgggaaaagtgctaccaaaaagagacggtagtaaaaaaattgattttcaaacccgtcagaatgccgggcgatatcagcaagtatcttggcggttctgcgggtatgccagcgatcttaattgaaaagcatcgcgccgaccagcaaggcaatattgtccaaatagatattgaatattggcgatttgaggccgtagacctcatcattaatctgtaggtgttttatggtgacaataaataacgcaagaaagattctacaacgtgtcgacactcttcctctttatttacatgcttatgcctttcatttaaatatgcggctggaaagagtgttgcctgctgatttacttgatatcgcaagtgaaaataatctacgtggcgtcaaaatccatgttctcgatggcgagcgtttttctcttggtaatatggacgataaagaactctctgcctttggggataaagcccgccgtctgaaccttgatattcatattgaaaccagcgcctcagataaggcatctattgacgaagccgtcgccatcgcgttgaaaactggggcatcgtccgtacgtttttatccacgttatgaaggtaatttgcgcgacgtattatcgattatcgctaacgacattgcctatgtacgggaaacgtatcaggacagcggcctgacttttacgatcgagcagcatgaagatttaaaaagtcatgagctggtgtcgctggtcaaagaaagtgagatggaatctctttccttactgtttgattttgcgaacatgatcaatgcaaatgagcatcccatcgacgctttaaaaacgatggcaccgcatattacccaggtccatatcaaagatgccttgatcgttaaagaaccgggtggcctgggtcataaagcctgtatttcaggtcagggtgatatgccgttcaaagcgttattaacgcaccttatctgcctgggtgatgatgagccgcaggtgacggcatatggcctggaagaagaggttgattactatgcgccggcgttccgctttgaagacgaagatgataatccgtggatcccttatcgccagatgagtgaaacaccattgccagaaaatcatttactggatgcgcggttacgtaaagaaaaagaagatgcaattaatcagataaatcatgtgcgtaacgtactacaacaaatcaaacaagaggcaaaccatcttctgaaccactaataagttttaactcatacgcagttaataaaaccattccatatgaatggtcggtatcttattgcctttaaaacagtgattttaaaaatcgcttaggggatgttatgctcacgaaaaagaaatgggcgttatttagtctattaacactgtgtggcggtacaatttataaattaccgtcgctgaaagatgcgttttatatcccgatgcaggaatatttccatttgaccaatggtcaaattggtaatgctatgtcggtaaactcatttgtcaccacagtgggcttttttctgtctatttattttgccgataaactaccgcgcagatacaccatgtcattctcactcattgcgacaggattactgggtgtttatttgacgacaatgccggggtattggggcatcctctttgtctgggcgctatttggcgttacttgcgacatgatgaactggccggtcttgctcaagtcggtaagtcgattgggcaatagcgaacaacaaggtcggttgtttggcttcttcgaaacagggcgtggcattgtcgataccgtggtggcattttctgcgttggcagtatttacctggtttggcagtggcttattaggttttaaagcaggcatctggttctattcccttattgtgattgccgtaggcattattattttctttgtcctgaatgacaaagaagaggcaccgtccgttgaggtgaaaaaagaagacggagcatcgaaaaacaccagtatgacctcggtgctgaaagacaaaactatctggcttatcgcttttaacgtcttcttcgtttacgcggtttactgtggcctgacattcttcattccattcctgaaaaacatctatctattgcccgttgcgctggtgggggcttacggcatcattaaccaatactgtctgaaaatgattggtggaccgattggtggcatgatttcagataagatcctgaaatcgccaagtaaatatctatgctacacctttatcattagtaccgctgcgctcgtactgttgattatgctgccgcacgaaagtatgccggtctatttagggatggcatgtacgctgggctttggcgcgatagtctttacacagcgagccgtattttttgcacctatcggcgaagcaaaaattgctgaaaataaaacaggtgcggcgatggcgttgggtagctttattggttacgctccggcgatgttctgcttcagtctgtatggctacattctggatttaaatccggggattattggctacaaaatcgtgtttggcattatggcctgcttcgcattcagtggtgcggtggtttccgtaatgctggttaagcgtattagccaacgtaagaaagagatgctggcggctgaagcttaattaatggccggatgtgcttaatccggccaacgaaaaccgtatcaaccgtaggccggataaggcgtttacgccgcatccggcagtttcacatcagaagaaatacttcgtcccgatacggatctggttttgctcgcggtggtacggttcgacgttgcggtctaaccagcgcaattcgaaataagggagccagtgttcattaatacggtaacggaaggtgttagtgatttcccaatgatgatctttcccgttgctactattaaagtcattcactcgcatgaagtaatgtggctcaaatgtataggaaaatttatcggtgattttaaaattccagtaggtgccaatttcataggtgtcattattatccagttccccgctcaaatctgttgaactatagttattatggttatagcgatttcgtactgtcagattaaaccatggtacaaatttatagttgacgtccagatacactgcaccacccgaaccgatactcttatcattaattaagccaccgggctggatggttaatttatcggttggtttaaataacggataccagccttcaatttcgttatatccatgttttagttcatcttctcgctgaaagttgtaggtattggttaacataatacccgcgcccatatcgaagttataacccacacgtagcataacctcgccctgatcggaggcaagattatatgcctccctgttttcgacgtatgcgccagcaaataccgaggcagaggtcagagaagataataaaattattgcattaatctttttcataataagtccattttttaaacgtagggaggccgccacccaccaggatggaaatagcggctattgacatttataacgttacggaagcccgttttttcttctgtcgccatctctttatttttgcgttggttgatttcctcaataatcaatgcaaaccgtttttcattgagtgtgtaaaagaatcccatcgtcaatgcagcaataattgccagtgcacaaggccagataaaaatgagctgacgcaaaccctgtaatgtcgcatcgctttgcgcgatgttgggaacataaccaatttgcgtcagcataatgcctggcaagaagccagcaagtgcggcagaaattttacgaaagaaggtataaccggtataaacagaaccttcggcacgaataccggttttccattcaccgtaatctacggtatctggtaccagtgcccagttcaggctgtttacaaaggccgtgccaaaaaaggcgacacaagagaacatgacgaaagtgaaagagttacttccccagaaataattcagtatatcacccaccgcccacagcaccatgccagccagataaacctgttttttaccaaaacattttacagttaatggcaccagtaatacgccgatgaggatgcatcccatactgaagaatcccatccacgacaataaattaatatcattcagcacatactgggtgtaatagacctgaatcgccagtttgatattaaatgccgccagggtacacaagttagcaatgcataaaaccagcaatggcggattccgaaatatcgcgcaaaatgatttgagaatactggctttatgtccggttggcgttgtgtccacataatgctctttgacgcctctgtagcacagcatcataaaaataaagccgccaatggagaacataagtgccgcacaggcataaccgacggttgagtcagaaaaaagcgactgcaacggaataaacgccacggtacaaatcaatagccctatggttgcaccaccctggcggtaagccgcgagctgcgcgcgctcattcgggtttttggtaattgccgggatcatcgcaccatacgagcagttcatcagactgtatgaaagtccaaacatcataaacagcgcggtggcaatcgtcgttttaaccggcaaacaaaaggtggtggcgataaactggagcgttgcaattaacgccgccggaaccgctgcatataaaataaagggacgaaatttgcctttaggcccaatatttttccgcgagtcgagtaaaaatccggtgagcatatcggtaaacgcggtaaaaaacttcgccaccagaaagataatcccgccatagtaagcaggcatccctaattcatcggtataaaatttgaggagatacagagtaccgatgcagagcattaaattcgaaccgacgtcgcccataccataggcgattttttcccgcagattcagttttaatgtcagtggattatggtcagacataatcactccttataacgccccgcagggcgtcgtttattattattacgccgtgcgtttacgggcttctatctcttccacaatgcggacatacatcttctcgttcaggctgtagaagcaacccatcgccacaatggtgactaccgccagtgcgcttgggtagatgaagatcaactggcgtaacccttcaatggtgtggtcagcctgtgcgacgttcggcacatagccaatttgcgtcagcatccagccggggaagaaaccagccagcgcctgagacactttgcgaaagaaggtaaaaccggtgtagaccgttccttccgaacgcacgccggtgcgccactcgccgtactcgacggtgtcggaaaccagcgcccagttcaggctgttaacaaacgctgagccaaagaacgccaggcaggagaacgccacgaagctgaccgaaccgccgccgaagaaatagttgagcagatcgcccagcacccaaatcagcaggccgccgatataaactttcttcttgccaaaacgtctgactgaggcaggcatcaggaatacgccgatgaaaatacagcccatgctgaaaaatcccatatacgacaacaggatgggatcgttaagcacgtactgggtgtaatagacctggatggcgagcttgacgttaaacgcccctaaagtgcagaggttggcaatgcacagaatgaacagcgggcggttacccgcaattgcgcggaaagattgcagcaggcccggcttttgcgccggattagcaggctgggtttcgacataacgctctttcacgcccgagtagcagatccacataaacagcaggccaaacagtgaaaacagcgtggcggcgaagatatagccaagttgctgattaccttcgataagattcataactggcacgaatcccaccgtgcacagcagcaggcccagcgtagcgccgccctgacgccatgccgccagtgaggcgcgttcgttggggtttttggtgatagcgggaaccattgcgccgtaggagcagttcatcatgctgaaaaacagtccgtaaagcataaacagaatagtggccatcaccgttttaccggtgacatcaaacggtgtgccgacaaagttggcgatcgccagtaaggtgaccgggaatgacgcatacagaataaaaggacggaacttaccttttggaccgatcttgcgtcgggaatccaacataatgccggtacccatatcggtaaacgcagtaaagaattttgaaatcaaaaagataatgccgccataggtgcctggcagccccagaacgtcggtataaaacttcaaaagataaagcgtaccgatatccagcaggatgttagaggccaggtcgccaataccgtaagagagtttctctttaaagggcaggcgtaaagttgctggatcttccgttgtgatgtgactcatcgatgttctccctttgcccatgagtttccccacgggcggatgtgattagatgctttttaacgacgcgaacagtgccgcccattcgctatcggcgcgataaaagaccggcggcttgccgatgggcgcattaacggtaacttccccgccccggaacgcttcacccgtccaggcgtggacccagttatcctccggcagatagagcgtccagtcgctacggccttcttcatgcaccggagcgaccagaatgtcgcgacctaacaggtactgatatttcagggtgtaagtgtgcgcatcgtcttcgtaatgcaggaacagcgggcgcataaccggcaggccggacttcgcattcagcgcgacggcctctttcaggtaaggtttcagggtggtgaagacggtggtcatacgggcgaaatgggcgatggtttctgcgtcgccgtcaaactgccagttgtcgccaggacggttaccttcgtgggtgcgcatcatcggcgtgaaggcgctgaaatcgcaccagcgcagcagcagctctttgctgcgcttcatctcaaacagggtggtgtaaccgccaatgtcgctgtggtgcaggccatgtccggtcattgccagcgacagcgccgccgggacaaccgacgccaggccatcgtcgagactccagtcgacgttctggtcgcccgcccacatcatggtggagtatttctggctaccggtagaaccggcgcgcataaagaaaaggatctcgccgagcttgcccgtttcttcaagggcttcgtagttacacttcgcccacagcgcaggccaggcgttatgcataatttcggcactgacgccgttatgcaagtacgtgtcggtgggcagatactcgccgaagtcagccatccagccgccgcagccgagttcaatcatgttctttttgatcacttccttgaaccaggcgtaggcttctggattagtgagatcgacaacgccgccgtaaaactcgccaaactccaccagatagtcaccgccagaggcatcttttgccagatagccgtgttgtgccgcttcttcgcagagatctttatcgctggcaacatacgggttgatataggccaggaactgcacgccctcctgattccactgcttaatgcgtgaatccagttgcgggtagttttcgctgttccacttccagttccacatcacgcgtttgccaaaagaggtcatacgaataccggaccagtcctgcgcccagatgccgttgaccttcacgcccgcgttacgcatggtgtccagtttcttctggcacacttccgtcccgccctgaatgccgagcgttactccgtcataaatccagtcgggcagttctggctggcgtcccagcagggcggttaatttttccagcagggaaatgtatgtgtcagcacattcaaaacgcagcgttgctttgtcttcccacagcgccagttcatggtattccggggcactaaagtcgaagttcatatagcaactgttatcaacatggcagtaatacttctgcgtgctgacaaacgtaggctgtgggaagaaagtccagtaatagtcgccgcccgcattttctttgcagtcggcctgccaggtgacataggtttgtttgttgcgaccaacgccttgttcactggtccatagcgggaacggtttgccacgcagatcgaagtaggaaaactgttcgccgcagccgtagatatggtcctctggttgagcggcaaggcgcagccagatacggttgtggttaaggttgtcgttttgtagttccagcaataaacgcccctgatcgtcggcagagatattcagcgtggcgctaatgtcagaaccacggctgaaatgaattaaccaaccatccggtgactggctgacgatggcgtcggtaagcgcaattttctcctgtagtttatctttaatgctgaaattaccgcggaacatatcgatatccgctatacctgagccaatccataaacaaggattatctttgctatgggttaaaataagacgttgttgaaaatgtagggtaaaactgtcgttattctgatgaaattgaaaatctaataactgtggacgtggcgtatccataactaatctccatagagttgagaacgagattgttgccttcctgttattacaggcttatgtaaaatgattctcataaaactgatatataaaaactttacagaagctgagctgtttttaacttaataaattgaagatacataatgttgcctttagcgagtgaaatgttcttcaatgattttgactgctaatcaatacaagttattttctctgtccgtaaatattaaaaaacaggcggtgcggttttcctgattccagtaataataagtcgatacctgaattaaaggcgttaggcgggcaactcataggttcaactgccagtccctgacgctgtaatttttcaccgctataaacctgcacccagagttgatcggaacaaaggcttaccgaaagcgcctgctgtggatgggtaatggtcatttcccacaaatcattagcggttttaaaggtgtggtcgatttttgtcgcggctatttttttcgcctgcgtgaaatttaaatccagctcatcaacgtggtgaagcgttgtcggattcgcgtgctcatcgacggcataaacctggtttgccggaagctggaacagatattcatcaacagatgttaagttgcaggttaaataaggatgaatacccacgccataaggcgctgcgacagtgccgatattctggcttgcgatctcaacggaaagacccgtgtgtgcgttgagcgaataaacaacttgtgaagccagcataaacggatagccgtaactgggcggcagaaaagctgtcagggtaacgctggtggcggttaattcactaatttgccagtctcgccaggcaagcagcccgtgaatagcggcttttgaactatgttcattaatgggtaactgatattcctgcccctgatagcggtaacagccgttggcgatccggttcggccacggaataagcactttacccagatgcgccagcggcatctcttcgggtttgtgcgggatgactaaatgacaaccctgaaaggttaattcagccagaccagcaccgacggtcacaatggtcgcgtgataatcccccgcggcaagtgaaacggtctgtccactgcaatgcatattggtgatttgcatacaaggcaccttaattaacgacatacagcctcccgtgaggctgatgtcaaacccaaaaactgcaccggacggtcccctcgcccctttggggagagggttagggagaggggaaaacccgcaccctattttcagatcagttatttcgcattaatatccagcagacccgctgcaaccgctggagccatgccgggcgctaacgggatacgcgggatcaccaggcaatgcagcaggtgataaatatcctgtttgccgtcccagactttggtggtgaccttattgtccgcatccagctcctgccaccaggaaccattttcatagtccatcaggtacttaatgcagtactcccaccatgtttgataccaggtttcatactggcgatcgccagtgacggtgtagagcgcgtaggccgtacccattgcttcgacgataggccaacgtacacgttcgcggaccaccggttttccttcccagtcaacggtataaacaatcccgtccgcgccatcgggtgcccaggcatcgcgcacggtggcgttaaacagacctttggcatcttctagcagccatgctggtggttgttcgcaacgggcttccagggcagcatggatgtgcagcattaaacggccccattcgatccagtggcctggtgtacctccgaacgcgcggaagcgatgcgccgggttatctttgttgtaatccggcagcggattccactgggtatcgaagtgttcgttaacgcgataatgattatttctggcgacgtcgtggataatcacggaagccacgcgaatcgcgcgatccagccattttttgtcgtgagtgacgtcataaacaatcaagaaagcttccaccgcgtgcatattggcattgccgccgcggtactcttcggttttgctgaaggcttcgtcccaggattccaggcacatctgctcttcttcgctccagaaatatttctcgataatttcaatggtgtaatcgagcagcttgcgcgcttccgggtgacccgttgtgacggcgctggcggcacccagcagagcaaagaagtgttgatagccctgtttggaggcatccaccacgccctcgtcattcacgcaggcataccagccgccatattttttatcacgcagtgcgccgttcatggctttgataccgtgatcaaccaacgagtaagcgccaggtcgacccatcgccgcagcaacggaataaacgtgcaacatacgagcggtgatccacagatgggtgcccatctcttctttgatttgccctttattgcctaaccagccaaaaccagtcggcactacggaatttttaccaaaatcaaagatgcggtcggtttcctgttccagccaacggttgtggcttagggtgttaaaccatttcattccttttatcctcatcttagcggcgtttagccatcatttcgtcgacgatatcgccaagttgttgtaatttcggtgcgcaaacgtcacgcagcatcagctcgttgtctggtaaaccgacgaccgatgcccagactgcacggcctgccaggaatcccgatgcgcccgccgtcattgccacgcgtacggcacgcgggaacagtttttcgtcgacaccggaagagaggatcacccatggcatattgatatggtcattcagacgttgtgaagcacagagaagctcttgttgcggacctttgccataaagcggcatttcaactttgtagaggtcagcgccactgtcgcccagctctttggcggcatcgatgatcgcttgttcgcgatcgaatttatcgccacgacgcggtgggcggacgactggctcaatgatgcttaccagaccgtgtgagtggcacagttcgttgaactctttcaccatatccagacgttgctgcgcatcttcatcactacgccacagcaccagcagttttaaggctttgccaccgtcttgtttgatctgtagcggattgattttgcggtcaataaccacgctatcgaccggaataccgttgccaggaatgaactcatcggcggcgacaatcatggcgcaacttttggcaatcgcgttttgctcaaccacctggcggtagcagaattgttgatctaccagaatcgccgaggcataaggcgagagggcctttgcagcgttaactttgaaatcagttaaaacgctatcggctaccggagcgggtgccccagccgcggcaaacatcatgcgcatggcttcgcgctgatcgaccgccagcatggcaaaaccgcccgatgcgcgcgtaatgtcgttgatggtgtacttattcattcatttattcctttatccagtcgttacatttttactttggcagtcatcccggcactgacacggacctgttccagaatggcggaccagtcctggcgaccgcgacccgctgcgcgcgcctggctataaacctcccgtgaggcggcccccagcggcattggcacatgcagctggttggcgacatcaagggcgatgccaagatccttatgggcaagatcgatcatgaaggcgggagaaagatctccgctgaggactttgtttggccaggaagtggtgaagtgacctttaccggcggcggtaccgctcatcactttgacggcaacatcgaagggaagattcagggcttcgcacaaaacggcggcttctgccgaaagcgcattgagcgcgatgctcatgtagttgttgatgagcttaacgcggatccccatgcccggaccgccagcgttgatcaactcactgcccatcgccatcaggatcggtgtggcacgttcaacttgttcagcggtgccgccagccagcagtaacagagtaccggtaatggcatttgcagaagtacggcctaccggaacatccatcatgctgaagcctttggcttgcatatcggcaatcaatttatcggtttgcagcggatggatggtggacatatcaatgaccagcgcatcggtagataagccttcgcaaacgccgttttcaccgaacaacacgttgcgcaccagatcgccattcggcaacatggtaatgataaattcggcatctttagcggcctgcgccgggttggcggcgggagtcgcacctttgtctaccagatgccgcacagcttcggcgttcacatcaaagacgcgaagttgatgcccttgctgcaataaattgctcgccattggcgaacccatttgtcctaaaccgataaacgcgattgctgccataaccctctcctgaatacagttatgtcactttttgtcatttatgacatgctttgcttgtctgtttttgatcgtatttgtaatttatcgtcaaaaaattgacagccgtcactttttaaacaattggtgaaattaaaatgaacgcatcccaaaatgtttaaggaatgaccatgattcgtgttgcttgtgtaggtataaccgtgatggatcgcatctattacgtggaagggttaccgacggagagcggtaaatacgtggcgagaaattatacggaagttggtggcgggccagcggcgacggcagcggttgcggcggcaaggctgggggcgcaggtcgattttattggtcgcgtaggtgatgacgacacgggcaacagcctgctggcagagctggaatcctggggcgttaacacccgttacaccaaacggtataaccaggcgaaatcttcgcaatccgccatcatggtggataccaaaggcgagcggataatcattaactaccccagcccggatctgctgcctgacgcagagtggttggaggaaattgatttctctcagtgggatgttgtgctggcagatgtacgctggcacgacggcgctaaaaaagccttcaccctggcccgtcaggcgggtgtgatgaccgttctggacggggacattacgccgcaggatatcagtgagctggtggcattaagcgatcacgcggccttttcagaaccgggtctggcgcgcttaacgggcgtgaaagagatggccagtgcgctaaaacaggcacaaacgctcacaaatggtcatgtctatgtgacccagggtagcgcaggctgcgactggctggaaaatggtgggcgtcagcatcaaccggccttcaaagttgatgtggtagataccacaggtgcgggtgatgtttttcacggcgctttggcggtggcgctggcaacaagtggggatttagcggagtcagtccgcttcgccagcggtgtagcggcgttaaaatgcacacgtcccggtggacgagccgggatccctgactgtgatcaaacccgatcttttttgtcactttttgtataaaatgccagggtgatggtttttcgaggaattttcatgagccttaccgaactaaccggtaacccgcggcacgaccaactcctcatgctgatcgccgagcgtgggtatatgaatattgatgagctggcaaatctgctggatgtctccacgcagacggtccgccgggatattcgtaaattaagcgagcaaggcctgattacgcgccatcacggtggcgcgggtcgggcttccagcgtcgttaatacggcgttcgagcagcgtgaggtttcgcaaaccgaggaaaaaaaagcgattgccgaagcggtggcagactatattcctgatggttcaacaatatttatcaccattggtacgactgttgagcatgttgcccgggcgttacttaaccataatcatttgcggataatcaccaacagcctgcgtgtggcgcatattctttaccacaacccgcgctttgaagtgatggtgcccggcggtacgttgcgctctcataatagcgggatcattggcccttcagcggcgtcctttgtggctgattttcgtgctgattatctggtaacaagcgttggggcgattgagagcgatggcgcgttgatggagtttgatgtaaacgaagctaacgtggtgaaaacgatgatggcgcacgcgagaaatattctgctggtcgccgatcacactaagtatcatgcttcggcggcggttgaaattggtaacgtggcacaggtcactgcgctctttaccgacgagctgccgcccgctgcgctaaaatcacgcttacaagacagccaaattgaaatcattcttccccaggaagacgcgtagatttttgtgaccgttaacctggcttcataccttgccacatagccaaacccatcctttcccgctacagttaatttcttgtggcgcgaaaggaggcaaaaatgctctatatctttgatttaggtaatgtgattgtcgatatcgactttaaccgtgtgctgggagcctggagcgatttaacgcgtattccgctggcatcgcttaagaagagttttcatatgggggaggcgtttcatcagcatgagcgtggggaaattagcgacgaagcgttcgcagaggcgctgtgtcatgagatggctctaccgctaagctacgagcagttctctcacggctggcaggcggtgtttgttgcgctgcgcccggaagtgatcgccatcatgcataaactgcgtgagcaggggcatcgcgtggtggtgctttccaataccaaccgcctgcataccaccttctggccggaagaatacccggaaattcgtgatgctgctgaccatatctatctgtcgcaagatctggggatgcgcaaacctgaagcacgaatttaccagcatgttttgcaggcggaaggtttttcacccagcgatacggtctttttcgacgataacgccgataatatagaaggagccaatcagctgggcattaccagtattctggtgaaagataaaaccaccatcccggactatttcgcgaaggtgttatgctaaaaaccattcaggacaaagccaggcaccgtacccgtccactatgggcctggctaaaactactctggcaacgcattgatgaggacaacatgacaaccctggcaggtaaccttgcctatgtgtcgttgctctcattagtgccgctggttgccgttgtttttgcgcttttcgccgcttttcccatgttttccgacgtcagcattcagttacgtcactttatttttgccaactttctgcctgctactggcgatgttattcagcggtatatcgaacaatttgttgccaattccaacaagatgaccgccgttggggcgtgcgggctgatcgtcaccgcgttattgttgatgtactccatcgatagcgcgttgaataccatctggcgcagtaaacgagcgcgaccaaaaatttactcgttcgccgtgtactggatgattttaacgctggggccgctgctggcaggggccagtctggcgatcagttcctatttgctctccctgcgctgggcgagcgatctcaatactgtcatcgacaacgtgctgcgtatttttccgttgctgttgtcgtggatctccttctggttgctgtacagcattgttcctaccatccgcgtacctaaccgcgacgcgattgtcggcgcgtttgtcgccgcactcctgttcgaagcaggaaagaaaggtttcgcgctttatatcaccatgttcccgtcatatcagctcatttatggtgtgctggcggtgatccccattctctttgtttgggtctactggacatggtgtatcgtcttgcttggcgcggaaattactgtcactctcggggaataccgcaaactaaaacaagcagctgaacaagaagaagacgacgaaccatgattgcattaattcaacgcgtaacccgtgccagcgtcaccgtggagggagaagtgacgggcgaaattggcgcgggacttttggtgttattgggtgtcgaaaaggatgacgacgaacagaaagcaaaccgtctgtgcgagcgtgtgctcggctaccgcatctttagcgatgccgaaggcaagatgaatctcaacgtgcaacaggcgggcggcagtgtgctggtggtttcccagtttaccctcgccgcagataccgaacgggggatgcgcccaagtttctccaaaggtgcatcaccggatcgcgcagaggcgttatatgactatttcgtcgaacgctgccgtcagcaagagatgaacacgcaaacaggacgcttcgctgcggatatgcaggtatcgctggtcaatgatggccccgtgacattctggttgcaggtatgagccagcttccagggttgtcacgggaaacaagagagagtatcgctatgtatcaccttcgggttccacaaacagaagaagaattagagcgttactatcagtttcgctgggaaatgttgcgtaagcccctgcatcaaccaaaaggttcggaacgcgacgcgtgggatgcgatggcgcatcaccagatggtcgtcgacgagcagggtaatctggtggcggtaggccgactgtatattaatgccgacaatgaagcgtccattcgctttatggccgttcatcccgacgtgcaggacaaagggttaggcacgctgatggcgatgaccctggagtcggtggcgcgtcaggaaggcgttaagcgcgtgacctgtagcgcccgtgaagacgcggtggagtttttcgccaagctggggtttgttaatcagggagaaatcaccacgccaaccaccacgccgattcgccattttttgatgattaagcccgtcgccactctggatgacattctgcatcgcggcgactggtgcgcgcagctgcaacaggcgtggtacgaacatatcccgcttagtgaaaaaatgggcgtgcgcattcagcaatataccgggcaaaaatttatcactaccatgccagaaaccggcaatcagaatccgcaccatacgctgtttgccgggagtttattctcactggcgacgctcactggttggggacttatctggctgatgctgcgtgaacgccacctcggcggaacgattattcttgcggatgcgcatatccgctacagcaagccgattagcggtaaacctcatgcggtagccgacctcggtgccttaagcggcgatctcgaccgtctggcgcgcggacgaaaagcacgggtgcagatgcaggtcgaaatctttggcgacgagacgccgggtgcagtgtttgaaggcacgtatatcgttctgcccgcgaagccatttggcccgtatgaagagggcgggaacgaagaagagtagctgatggagaggggcggtgctgcctctctcattcaggtcatttatattagtccttggctatttcggttatattaaataagaactctataaatttttattcttcgttggctccatacgtgtcttgctacatcactgttcaggagcatttaaatattatttgtagaactgagtggcaattatcgcagataatgcttaattcatcatcttagttcatgtttgagcgatttttgatagtcaaaaccccctctggtgccatacttttctcataaatatttttaaaatctatagctaacaaatattatgcaaagataatggactagcatcattgtcagtatcattcatttactgctctgtatgttatgaataattatgttgtatgtttgctcttaaaccgtgggaaggaggctataatggttgccaatattaatctcattaaacaagaaagttattctgttgttaatttagaaaaacaactttcccgaactgttaccaacaaaattataacgatgagcaagtaaagaccggttggtggcagtactgaccggtctgtgatgaaagattaatttcaccttaaatcctggtgctgttaggatgctgacgtttttcggctacaccattcagattatgcaaataaatatctctgaatataatatattcatagcacccataattcatcctgggcgataactaaaccatttttgagtaataaatgaaacaactgcaacactcttattatttctggaaaacgcctcgcaaaaacaaaacaacatgcaaaaatccgctttttttaaatgattttccggcgtaattttcgcacatacattaatgagtaatatatgtaaggtattggtaatggcgatgaatacggtttttcttcatttatcagaagaggcaattaaacggctgaacaagcttcggggctggcgtaaggtttcacgatctgcaattttacgcgaagcggtagagcaatatctggaacgtcagcaattcccggtgcgtaaagcaaagggaggcaggcaaaagggggaggtagttggtgttgatgatcagtgtaaggagcataaggaatgacaaaaatttttcattcttgaatataaaaaacagatgcccttattctggtattaatacaaggctgttttacttgaacttataataactgcaactgttacatcatatctggaaaacgcctcgcaaaaataaaaaatgatgcgtaaatgagctttctttaaagattcggcaagggtacttttctctccatagattcaaaaatgatattggcgagatatttatgaactctctggcaggtatagatatgggcagaattttactcgatttatcgaatgaggtgattaagcaacttgatgatctcgaggtgcagcgtaatcttcctcgtgcggacctattaagggaagcggtagatcaatacctgataaatcaatcgcaaacagcaagaaccagtgttcctggcatctggcaagggtgtgaggaagatggtgtcgaatatcagcgtaagctgcgcgaggaatggtaatgggaaaaaatgatgtcaatcagattgctgacaacgtgcgcgttgttcatgccggatgcggcgtgaacgccttatccggcctacaaagtcgtataaattcaatgtattgcagtttattggtaggcctgataagcgcagcgcatcaggcaatcttacgcttgtcatcagtctcatgcccataaccttattgatgtggtggtgggtaaattgaggccaaaccggcactggcggcatagcttgaggtggtaacgcggaatacgagagatggtgtcgtcacaccctatgagctgtaatccgggcgacctgcgccacccggaaaacgtcagagattactctccttcacccggaaacaggaacgggttgatggaactgcgggcatagccttcttgctccattcgtgcgtccagtaccagagaggcgaggtcatctgctacggcttcgatttttggatctttttcctgatagagaattttcaggtaagtgtcgcagtcatcgcagctttcggctttaatcgcggcctgttcgtcatccagcgaccagtaatgcagtttgccgctctgctcgcagttgctgcattttacgcgcactacgtgccattcagtttcacacaggttgcagtgcaggtaacgtagcccctgagtggtgccaatttgcaccatgctggacaccggcatagaaccacaaaccgggcaatattgacgttgctcgccgtattcagcgcgggctttgccggggatcagattggccatctgcgcccagtagagcgacagtgcagcccagataaacggcgctttatcgctgctgacggacgagaaatcagaggcaaacagcgcgctggccatatcttccagctcctgagtcgatgccttctccagattctcaatcactgccagcgccgggccgctcatttcaggtttcagctcagcaatcagcgccatcagcagcttttgccagtgcttatcacgcggcagaacgtgaatatccagcgggggcttgccttgtgcgctggcttctttaatgcgcgcagtcagatccatctccagcggatggtcgtacagcaccacttcctgggcgtgggcgataagcgcagcaaagcgcaggtaatcacccagaggattattttctgccagctcgcgcagacgctcggcgcggcggttgtataaattcttgagccgagggaacaataacggcggaatcatatccgccgtacgtttctcgcttgaacccagctcatcttgcgggattatgcgaatactcattcagctttcttttccgttgtcttgcggacctcacggtaccagcgcgggtgatgtttcttcgcccaggcgctggtaacccatccttccaccatggcggtaatcgtgcctttcacccaaagggcggcgtagatatgcaccatgataaccacaattaacgccactgcggcaaatgaatgcagcattaacgcgaatcggatcaccgggattgagaaagcaggcgcaaaataaggacgccagataatcacgccgctcaccagcagcagaaccaggaaaataatcgccgcccagaaaacgcatttctgaccgaagttataacgcccggtgtcacctacttcctcgttgacgacgatcttacgaatattcttcgcccaaaagatatcatcccgattgattaggttgtgatgccagtaacggaaaaacatgatgatgaacgaggcaaacataaccacgccgacaaacgggtgcagaattcgcgccagctgcggtgtgcccatgatttgcatcaaccagttgaaggacgggaacaaaaagcccagcccgctcaccgccgccaggatgaagcagaaggcggtgatccagtggttgatacgttccggcgcggtgtagcgcacgatggtgtcacgtcgtttcatttgcgctcctcgtctttctcttcgtgcagattattctcttcctcatccgcacggttcggaccgacacccacgtagtggaagatactggccgcaaaggtagccgcaaagccaacagccgcgagcggtttccagatgcctttccagaatttcacggtttcgctgatttccgggttctccggcaagccatgatacagatttggcttgtcagcatggtgcagcacgtacatgacgtgtgtaccaccgacgcctgccggatcgtacagacccgcattgtcgtaaccgcgggttttcagctcagcaacgcgctcgctcgccagcgttttcatcgactctttcgtaccgaagtgaatcgcgcccgttgggcaggtcttcacgcaggctggttcttgcccaaccaccacgcggtcaacgcacagcgtacatttgtagacgcggttgtcttccgggttgaggcgcggaatgtcgaacggacagcccgcaatgcaataaccgcagccaatgcactgctcggactggaagtcgacgataccgttggcatactgaataattgcaccttccgccgggcacgctttcaggcagcctggatcggaacagtgcatacagccgtctttgcggatcagccattccagtttgtcgttctgctccacttccgagaagcgcattaccgtccacgatttggcgcttaaatcattggggttgtcgtacaccccaatgttattgccgacggtatcgcgaatgtcgttccactctgaacacgccacctgacaggctttacagccgatacaggtggtaacgtcgatgagtttcgccacttcttcctggaagtcccgcgcctgaggcgcgggggtcagaccgttagtcgcggaacgacgaatgatatcttgagattgataagccatatgtcgtctccgttacaccttttccacattcacaaggaaggacttaaactccggcgtctgcgtgttcgcatcaccaacgaatggcgttaaagtattggcaataaagccttttttagctacgccttcatagccccagtgaatcggaataccgatggtatcgatatctttgccgttcgctttcagcgtgcgaatacgtttggtcaccaccgctttggctttgatatagccacggttggaggagactttcacggtatcgccctgggcaatgccaagtttattcgccagcgactccccgatttccacaaactgctctggctgcaaaatcgcgttcaacagcgcgtgtttggtccagtagtggaagtgctcggtcagacgataggtggttccgacatacgggaacttatcggctttacccaatgcttcggcgtcgtctttaaagatacgtgcagccgggttcgagataacgtttggatgcagcgggttagttcccagcggcgtttcaaacggctcgtagtgttccgggaacggaccttccgccatcttatcgagggcaaacagacgccccatgccttcctgctgcatgataaacggcccgacgccgctacccggaggcgctgcgctgtagtccggaatatcccagccggtccacttagtgccgtcccatttcagcaactgacgcttcggatcccacgggttaccctgcggatctgcggaggcgcggttatacagaatgcggcggttaagcggccatgcccatgcccagcccagcgtgttaccgaggccagacggatcggcgttatcacggcgtgccatctggttgccttccggcgtccagctaccggcgaaaatccagcagccacaggaggttgtaccgtcatcgcgcaattgggcgaacgaactaagttgttggcctttcttgacgataaccgcaccggttgccggatcggtaatatcggccagcgccttaccgttgctctccatcgccacttcttctgaagatggctcatgcggaatggcgtagttccatgtcatgttcagcacctggtccgggttcgcgccaccctgttcggcatacatcttgcgcaagcgcaggaagataccggagaggatctcgccgtcagtcagcgcaatccccggggcgtccgcacctttccagtgccactgtaaccagcgacctgagttaacgatagaaccgttctcttccgcgaagcaggtcgatggcagacggaacacttcggtctggatcttcgacgagtcaacttcgttcagctcaccgtggttctgccagaagttagaggtttcagtgttcagtgggtcgatggtgacgaggaacttcagtttcgacagacaaccgatcactttgtttttgttcgggaatgaggcaacagggttaaagccctggcagatatagccattgaccttgccctctttcatcatctcgaagtattgcaggacgtcgtagcctttatcccacttcggcaaccagtcaaagccccagctattttccgccgtcgctttatcaccaaagaaggccttcatcatagagacgaagaatttcgggtagttgccccagtagtttacctggccttccagcagcggttttggcgtgttggcggtaaggtaggtttgcagatcggtctgcttctcgcttggcagcgtcatgtaacctggcaggctctgcgacagcagccccaggtccgtcagcccctgaatattggagtgaccgcgcagggcgttaacgccgccgcctgccatccccatattgccgagcagcagctggatcatcgccatcgtacgaatgttttgcgcaccaacggagtgttgcgtccagccgagggcatacaggaacgaggcagttttatcgtgagcactggtttctgcgatgtattcgcagactttcaggaacgcgtcttttggcgtaccacagatgttttcaaccacatctggcgtgtagcgggaaacgtgctgtttcagcaagttccacacgcagcgcggatgttgcagcgtggtatcgcgtttggcgaagccgttttcgtccagttcataagtccaggaggatttatcgtacttgcgtttttccgcgtcgtagccggtgaacaggccatcttcaaagccgtaatcctcacgcacgatcaggctggcgttggtataggcttcggtgtattcgcggttgaatttttcattgttcagcaggtacagcaatacgcctgacaggaaagcaatgtcagtaccggaacgaataggggcatagtagtcagctaccgccgccgtacgcgtaaagcgaggatcgatcacaatcagcttcgcgccgttgtgaattttggcttccatcgcccagcggaacccgaccgggtgagcttcagcggcgttaccgcccatcaccacgacgaggttggcgttcttgatgtcgacccagtggttggtcatcgcaccgcgaccaaatgttggagcaagacttgctaccgttggtccgtgtcagacacgcgcctggttgtcgaccgcgagcatacccagcgcgcgggagaatttttgcgttaaatagccggtttcgttactcgacgcggaagcacacagcatcccggtggagagccagcggttaacagtcacgccttcggcgttttgcgcaatgtagttagcatcgcggtcttctttcatcagtttggcgatgcgatcaaacgcctcttcccaactgatttgctgccatttatcagaacctggcgcacggtattccggaaacttcagacggctttcggagtggatgaaatccaccaggccagcgcctttcggacaaagtgcaccgcggttgaccgggtgatccggatcgccttcgatatggaagatagatgctttggcgttttttgctccgtcaccgaggctgtacatcaacagcccacagcctacggaacaataggtgcaggtattacgggtttcgcgggtgcgcagcagtttatactgccgggtttccgcgagtgctacgctgggtgcaaaacccagtgccgctgccgtggtgcctgccataccgccagcgcagatcttaaagaactgccttctgctgacctgcatggattgctccttgtttcgacattgtcacgtcccatttacattcgcttgctgcgtgtgcagggagtgggagttatttttctttgcggaaggggccgcaaaggtccagaattggctcaatttccctccatccaggaagggtttgtaacagaataccataatgttggtgtgtgtgttcttatctggttaagagaaagtgaaaaaaacacagcgaaaagaaatcgaaaatgtgacaaatatcacaggtgttcgtcaaattgagttatggcggcgtgatgatttacaacacccacggttagatgaggtcgcggaagaagttcccgttgcgctggtctacaacggcatttcgcatgtggtgatgatggcgtcgcccaaagaccttgagtactttgcgctcggtttttcgctttccgaggggattatcgaaagtccgcgcgatatcttcggcatggatgtcgttccttcctgtaatggtcttgaagtacaaattgagctttccagccgccgctttatggggttgaaggagcgccgccgggcgctggcgggacgtacgggctgtggcgtatgcggcgtggagcaacttaatgacatcggaaaaccggtgcagccgctaccgttcacccagacgtttgatctcaacaaactggatgatgcattacgtcatctcaacgattttcagccagtggggcaactgactggttgtactcacgccgctgcctggatgttgccatctggcgaactggtcggcgggcatgaagacgtgggtcgccatgtggcgctggacaaactgttaggccgccggtcacaagaaggggaaagctggcagcaaggtgcggtactggtttccagtcgtgccagttatgaaatggtgcaaaagtcggcgatgtgcggcgtagagattttgtttgcggtgtctgccgcgaccacgcttgctgtagaagtggctgagcgctgtaatctgacactggtaggtttttgtaaaccgggtcgggcaacggtttatacccatccgcagcgtttgagcaattaattaaaataagtcctgcgaaatatattaaattgcaggacttattcatttcgtgaattttattattttatttataaacaaaatgcgtgtagtggcgttttcttttttcatttattatgttcactctcttatctatatatttataaggcaattaaatgaaaaggaatttattatcttccgctattatagtcgccatcatgtccctcggtctgacgggttgtgatgataaaaaagccgaaacagaaacgctcccgcctgccaatagtcaacctgccgcaccagctcctgaagcgaaacctactgaagctcccgttgcaaaagcagaagctaaacctgaaacacctgcgcaaccggtggtcgatgaacaagcggttttcgacgaaaaaatggatgtctatatcaagtgctacaacaagttacagatcccggtacagcgcagtctggcgcgttatgctgactggctgaaagattttaaacaggggcctaccggtgaagagcgtactgtttatggcatctacggcattagtgaatccaacctcgctgagtgtgaaaaaggcgtaaaaagtgctgtggcgttaacgcctgcgctgcaaccaattgatggcgtggcggtgagttatatcgatgctgccgtggcgttgggtaataccattaacgaaatggataaatattacacccaggaaaattataaagacgatgcgtttgcgaaagggaaaacgctgcaccagacattcttaaaaaatctggaagcctttgaacctgtagccgaatcttatcatgcggcgattcaggaaattaatgataagcgtcagcttgcggaactgaaaaatattgaagaaagagaagggaaaacattccactactactctctggcagtcatgatttcagcgaaacaaattaataacctgatatcgcaagataagtttgatgcagaagcggcaatgaagaaagtgtctgaactggaaacgctagtggcgcaggccaaagaagcggataaaggcggcatgaatttctcgtttattaattcggcaggccagtatcaactcgaggctaaaaaatacgttcgccgcatcagagataaagtcccgtactctgactgggataaagagcaacttcaggacgcaaactcaagctggatggtcgaagactctttcccgagagcattacgcgagtacaacgaaatggttgatgactataatagcctgcgttaaacgtttttgatgataaatgcagtgtcggatgcggcgcgatccgacacagttcaccccttgtgaagtaactccataaatgcctcatatcctgttaacccggcaataatctccgccggatgctgacacaatatgcttgccagatagctaaatatttttagctcatgacgcgcatcggcggcggcgcaggcgatcaagacatggttaatgacttcgttattcacctcaactggttgggcgagggtaataaaaaatccacgaaaacgtcgctcctgttcgctccagcaatgtgggatggcgaggcgattaacaatcaggttttcaccttcgccttcgcgggcgatgatgcgttgtgcttcatcggcggtaatatggtgttgtgcgactaattgcgcacaaatttgccgggtaatatgttgccagctttcaccgcgtacattcgaataatgaaaacttccgggggcagagaaaaaacgctccggctgttggcgaataaatgccgtcgccagaaaatgttttatttgttcgataccggcagccgtaatgatattttttacggtgatgtaattatttaccgcgtcatccagtaaataatggctgttgttaatgatcaataacggctcaatctcttcgcgaatggcaacaagttcgcttaagctacgggcaataattacccgacaatttaaaacatcgcgctcaatggcgagctgattaatagtggcaatcgcgttctggtccgagagcaaaatgatcggctggcgttcgttttgatgccgctccagcgcacaggcaaaatacaaaccgatcagatcgctgtcgaaaaggggaatatcgagctgttcacgcagtagcgtaataaagtgcagactcatatcaaaggccgcaggccaggcggctttcaggttattcatgctgctctggcggtgctcagcaatccacactggtgcggcaaggcaacgtaataaatgcccggtaatattctcaaccagctgcgcatcaataatattcaatgacgcgatgcccggcaccctttgcagcaacccctgcacattatcggctgaaattacctgcgcttgctgatgctgtttctctatcaaacccgtcagggttcttacagcgttatcaccaagaaacagaccgctatgttcaacgatttgttttatctcgtcaccgggatattgcggccactcatcggtcagttgattacgcagggcgtaaatcgccagaatcaggctggagagataatcaccctgcatgagcggccagcggtgttggttgtcgcaggccgtggataaatgctgaaggttgtctcgtgttatgcccgccagcggaattaaaaacggatctttgcgcagcaagttcgccagcaagataacgcgtttctcttctgtctcatcaatgaaatggcccaaaccagggcggctggccaggcaacaagtgcgttcataacgctgttttaaccggggcagacgctctgctacccacgtttctggcaaattaagcgccgaggcgagttgcgcacggggagtgaaagtattcagtaataacagcgccagcagccgatcgtcgttatcgtgcttttgcagcaactgaaaaaagctgcggcgctcgaagatttccagctgatagcccgcactgccactggcgaaaatgcgggctttgccgttaagggtgaagttgagatagtcaatatcacgcaggatggtcctgcctgaaacgccagtctgttgcgccagctcgccaggcgtgcgcggctgttgctccagcagatcgacaatctttaactggcgttcgtttagcattaatccacctgacggaactggctaaacgcgttgactttctccgcagttaaggtcgtcagaaaaccccgtatcagcgtgagcagagcttcgtaatcggcttttgaaatcataccgctgttggcgtgcagataacgagttggcagacacagcgcgacaaccggacgcccgccgcccatcacgttgtagcgcccgccatccgtcgcaccggttttcatggtggaaaattgcagcggtaaatcgttatgtgcggcacagctttttaacgctgctaccagtttctggttggggaagtagcgcttgtcaaacagcatcagccccggcccctggcccagtttcagcgggtatttaatgttatcaatgcccggaacatcgcccgctacggcggtatccaacacgatcacgacgtccggtttaatgtgttccgccgaggtttgcgccccgcgtagcccaacttcttcttccacactgccaacgccatacagcgtaatttcgggattattcaccgtctgcaatagttcagccatcattgcgcagccgatgcggttatccaacgccttgccgaccactttatcttcgccccagcaggcaaaattggcttccgggctaataaaattaccaatttccacgccgcgcttttccacctcttcgcgactgttcgcgccaatatcaatgaacatctcatcaaatgacagcggttgttgcttttgcttttccgttaacgcatgaggcgcgacggaaccaatcacaccagggattttcactcccttgtgtgtgcgtatggttacccggtggttgagcatcgactgattccaccagccgccaatggtggtaaaacgcagaaaaccgctctcgtcgatgtgggtgaccataaagccgacttcatccatatgtccgacaacggcaacttttggacctttattccccttacgggcaacaaagctgcccagaccatcgaaggtgatttcattcacgcaaggttccagcgtgtttatcagaatgtcgcgaacttcctgttcatcgccgctgacggcgctggcttcgcacaactgttgcagtaactcaatgttcatggacaagctcctgttgcgcggctttcgctttgcggcgtaaccacaatcctttcaggacgataatgaatgaaatgttcagcgcgaggccaatcgccagcaccagataaaacgaacccaccggcgacatcaggccgatcagcgggtcaaagatacccaaaccaggtgccagacgtttgattccgaaagcgatcaccagcacgccggtaatgccgcccgccagcgtattggcggtaatcatcggcaacggagctgccagagcgtaaggaatagccggttcggttgcgactgtggcaccgaccacaatggcactactggcagcctctttttcctgtcgggtaaacagtttgggcgcaatgaacgtcgcaagacccgccgcgacgggcggcatcagcgcgacaacgccgacgatggcgtaccagtcataaatgtgtttttccagcagtgagaagcagaagaaccaggcggttttattgatggggccgcccatatcgaacgccagcatcgcaccgaccagaaacgctgccgcaaacttcattgatggaggaatggtattcaggaagtggagcagcccgcccatgaggtcggacatcaccggcccgataacgtagtaagtgagcacgccgaaaaccagcagagtaacgaacgggatcagcattgaaccgagcagcggttgtaatgctttgccaaggcgcactttgcggaaccagaagacgaaatagccaatcgccagccccagcaccaccgcgccgaggaatcccgcacccgactgggtgccgagcagcgctttgtcgttcgccagatagcaaaccagaaacgccggagcgaaagccggtttatcggcaatcgacgaggcaatataagcgcccatgatggggatcataaaggtgaagccaaggtaaccgatggattcaactacccaggtaaacgacggcgcgcctttcgacatatcggtatacggcaaaccgaactgcaccagcatgttggcaagcgccaccaggataccaccgccgatgacaaacggcagcgccgcagagacgcccgccatcaggtggctcatcacgctaccgctttgcacttcctgtttgccaagcttcacgccgctatctgcggcaaaaagctgcgagtttgtcggtaattcgctgaaaatctggtcgatatttttcaacgcctgggagatggcaatctcataaactttcttcccggcaaaccgcgcgcgatcatcaccgctcaggccacgcccggtagcgagaatgacgtaatcggcagcggcaatctcttcgctggataagcggttttcaacgccactggacccttgagtttccacttttatggtatgaccgagagaacgggctttctgttccagggcttccgccaccatgtaggtgtgagcgatcccggcggggcagttggtgatcgcgacaatacgtaaggatgactccatcgccacttccttatgagctgagggtttgatttaacaaggcaagcacctggtcggtatcgccctgttgcagttgatgaataaattccttgtgaataattttgcgacacagtgtgccgatgattttgacctgatcctcttcgccgctttgcggcacgccgaggcagatccagcaattgacgtcttcgccatcgctggctttccagtcaatagcctgcgctttgcgggcgaataatacgaacggttgtttaacgcaggcgcttttaccgtgcggcacggcgacaccggaaccaaatccagtagagtgcattttttcgcgcagcagcagggtttgcaggaactggtgtgagtcggtgataaaaccgttttgtaacgctattgtcgccaactgcttcagaacggaataagcgccattgccctgaatattcaggtcaatacagcttgcagtaagagctgccattaatcggactccataaaatatattttaatcaattgtaatggtggagcgattaagtgatgagaggcgatatgtcggtaaacaatgacaatttgagacagagtgaaaggtcagatttgcggagtaatgcacataatggttatttaaataaaccacatgaatcattaatgggttattcattatttttgtgatttactcacaatgtatcagggaaatataacttaccgggagatgtaatatgtttaatttttcaaatcgaaatttaaaatattgtgccggaggcatctctggcacattgggcaattacggcaggtaaaacacttcttgcagctcgctactcaccgggctgttatccgggttagcgggcataacatcggtcatatatttccaccaacgttggcaaacatcagtgctggcaaccgcattccagcgttcttcagattcaatctctaccatggcaaacagcagattacgcgctttgtcgagatagatggcgtagttatgcgcaccgtgagatttcagcactgcttccagttctggccagatgggattatgccgacgctgatactcttcgtgggcgtcggggtttacctgcatgacaaaggctttgcggatcatgtttgctccttacagcgccagcgcactggcgagtggcgtaacgccgaaacgcttgccgagcgctatcaactcttcacggctgatggtctgtttcatgccgcccatcgaataaaccttcactaatacttgtgctgatttttctgcggtgtcgattaaaccgaaggtttcatccagcgtcggtccgctgccgaagacgccgtggaagggccacaacaccagcgaatgtttttgcatctcttgtgcggtcgcctggccgatttcgtccgtgccgggcaccatccacggcaaaatgccaacgccatccgggaataccaccagacactcggtgctgccttcccacagttggcgagtgaagaccgcggtgtcgttttcaagtacataggtgagggcgatcaggttggtggcgtggcagtgcatgatcacccgatctttgccgttggtggctttaatgcgctcgcagtgggaaaggaagtgagccggaagttcggaagtggggacggcttcgttggttaacccccaaagaatgtggtagcccgcgccgtcgctgtcgacttttacgatgcctaagttagccgcaggatcaagctggacgttacggaagaatttgcccgagccggtgacaataaacggtgtatttgccagtaaaggcatgggctggctgagcgggatatagcgcggttgttggtggaaattgtcgtgatatggtgcgatatcggcgtcatccaggcgtagcgtcaggttgccgccgttgcgctcatcccagcctttcagccaggcgtcggtggtggctttgatcattccctggacaaaccaggactgagtaatgttttgcatgttctgtgttcctgtaaattcggtgttgtcggatgcacgacccgtaggccggataaggcgctcgcgcgcatccacggcaatcaatgcctgatgcgacgctgtcgcgtcttatcaggcctacaactattgccgacctgtaggcctgataagcgacttgtgcgcatccggcaatcaatgcctgatgcgacgctgtcgcgtcttatcaggcctacaactgttgccgacctgtaggccggataaggcacttgtgccgcatccggcaatcaatgcctgatgcgacgctgtcgcgtcttatcaggcctacaactattgccgacctgtaggccggataaggcacttgtgccgcatccggcaatcaatgcctgatgcgacgctgtcgcgtcttatcaggcctacaactgttgccgacccgtaggccggataaggcgctcgcgccgcatccggcagtgtttacccgcggcgactcaaaatttctttctcataagcccgcacgctctccagccattcgctacctgctggcgtatcgtgacgttggcaatacatttcccagaccgcctgccacggcaacgatttctgctcttccagcagtgccagacgcgcagtgtaatcgcccgccgcttccagcttgcgcacgtcagcggtaggttccagcaacgcacgcagcagggcttttttcatattgcgtgtaccaatgacccacgcggcaatgcggttgatagaggcatcgaagaagtcaaggccgatatgcacccggtcaaacagatcgtgacgcacaatctcactggcaattgcctgggtttcatcatccagcagcactacgtgatcgctgtcccagcgaaccggacggctgacgtgcagcagcaactgcggcacatacagcatggcggcggaaatcttgtcggaaatcacttcagtcgggtggaagtgcccggcgtccaggcacagcgcagtctggcggctggtggcataccccatgtaaaactcattggagccaaccgtgtagctctctgcgccaatgccaaacaatttgctctcaacggcgtcgatatggtgcgcagggtttagcttctcgctgatcacctcatccagtgctgccagcagacgctgacgcggggcgagacggtcaacggtgatatctttcataccatccgggatccagatgttcatcaccgatggtgtgccgagttgctcgccaaaataggccgaaacgcgacggctggctttgcagtgatcaatccagaactggcgaatgctgtcgtcggcatgggaaagcgtaaagccatcggcgcttagcggatgcgaaaagcaggaggggttaaaatccagaccgagctgattggctttcgcccattcaacccagtttttgaagtgctctggtttgatctggtcgcgcgagactggcgtatctgattccagatagatggcatgtaaattaagccgtttcggccccggaatcagccgcatagcctgttccagatcggcacgtagctcactggcattacgcgctttgcccggataattgcctgtggcctgaatccccccggtcagcgaaccttccgggttttcaaaaccggaaacatcatcgccctgccagcagtgcattgaaacgggtaaacgatcaagttggcgcagcgcctcctcgacatcaatccccaccgccgcgaaacgctgtttcgctagctcccaggcctgttccagttgagtggtcatgcgcaaagctcctttgtctgtcgtgtagagtgaatctgcgccacatagtgggcaatttcactgtcaggattaggggtaaaggtggtcagattcgcggtggtgctgacgacctgacggaaatcatccacattgttgagttcatccagcgtcattaactggatgccgatattgccgagcgtcgaggcttcaacaggcccggcgatcacccgaataccgcaggcatcggcgcatagctggttgagcagcgtgttctggcagcctccgccgacaatatgcagttgcgagaaatcttcaccgcgcagctgcgccagctcatgcaacacatcggcatacagcagcgccagactgtcgaaaatgcagcgcgccagttcagcatcactttccgggatcggttgcgccgtttcccgacacgcagcctgaatttcgctgcacatcgtctcaggattaataaagcgatcgtcattgggattgataatgaagcggcaagccggaagtgcctgtgtcgcggagataagcgccggaagatcgttgatttgctgctcctgaagcactcgctgaagcagccataagcccataatatttttcagcacccgatagcgaccttccgccccgccttcattggtgatgttggctgccagtgccgtgtcattggtaaatggcgtctggctttcgaagcccatcaatgaccaggtgccagaagagagataagcagcacgtgagccgtttaacggcgaggcgataaccgcgctggcggtatcatggctggcaacggcgaccactggaatctcattaccctgcgggcaaatccagtgacctatgacattacccggatgcgtcgggcgaccaaaccaggctttgttggccccgctccacgccagtagcgactcgtcccagtcgtcgctattgatattgaccagttgcgtggtcgtggcgttggtatattcccagttcatcttgccggtcaggcgataactgaagtaatccggcatcagcagagcgtgagcaatgtgtggaataagttcaggttgttgctccgtcagcgcacgcaactgataaagcgtattgaagggcagaaactggatgccgctacgttgataaatatcgcgtttgccgagttgttgttgtgcctgcgccattaggccattggtgcggctatcgcgataagcaacgggcaggcccacacgctgaccctgttggtcgagcagcacaaagtccacgccccaggtatcaatcccaatgctatcgatacgaatcccttcctcgcacaccttgtttaatccaaggcgaatggcactttcaaggctatccacatcccaggtgacatagccgttctgactatgcagcccattgttaaaacgatggatttcgcgcagcgtcaggctgcggcattcacgctcgtaacgcgccagcatcacgcgcccactggatgcgccgagatcgacggcgacacaattgcgaaaggtcataatgtgatcctgctgaatttcattacgaccagtctaaaaagcgcctgaattcgcgaccttctcgttactgacaggaaaatgggccattggcaaccagggaaagatgaacgtgatgatgttcacaatttgctgaattgtggtgatgtgatgctcaccgcatttcctgaaaattcacgctgtatcttgaaaaatcgacgttttttacgtggttttccgtcgaaaatttaaggtaagaacctgacctcgtgattactatttcgccgtgttgacgacatcaggaggccagtatgaccgtattacatagtgtggatttttttccgtctggtaacgcgtccgtggcgatagaaccccggctcccgcaggcggattttcctgaacatcatcatgattttcatgaaattgtgattgtcgaacatggcacgggtattcatgtgtttaatgggcagccctataccatcaccggtggcacggtctgtttcgtacgcgatcatgatcggcatctgtatgaacataccgataatctgtgtctgaccaatgtgctgtatcgctcgccggatcgatttcagtttctcgccgggctgaatcagttgctgccacaagagctggatgggcagtatccgtctcactggcgcgttaaccacagcgtattgcagcaggtgcgacagctggttgcacagatggaacagcaggaaggggaaaatgatttaccctcgaccgccagtcgcgagatcttgtttatgcaattactgctcttgctgcgtaaaagcagtttgcaggagaacctggaaaacagcgcatcacgtctcaacttgcttctggcctggctggaggaccattttgccgatgaggtgaattgggatgccgtggcggatcaattttctctttcactgcgtacgctacatcggcagcttaagcagcaaacgggactgacgcctcagcgatacctgaaccgcctgcgactgatgaaagcccgacatctgctacgccacagcgaggccagcgttactgacatcgcctatcgctgtggattcagcgacagtaaccacttttcgacgctttttcgccgagagtttaactggtcaccgcgtgatattcgccagggacgggatggctttctgcaataacgcgaatcttctcaacgtatttgtacgccatattgcgaataatcaacttcgttctctggccgaggtagccacggtggcgcatcagttaaaacttctcaaagatgatttttttgccagcgaccagcaggcagtcgctgtggctgaccgttatccgcaagatgtctttgctgaacatacacatgatttttgtgagctggtgattgtctggcgcggtaatggcctgcatgtactcaacgatcgcccttatcgcattacccgtggcgatctcttttacattcatgctgacgataaacactcctacgcttccgttaacgatctggttttgcagaatattatttattgcccggagcgtctgaagctgaatcttgactggcagggggcgattccgggatttaacgccagcgcagggcaaccacactggcgcttaggtagcatggggatggcgcaggcgcggcaggttatcggtcagcttgagcatgaaagtagtcagcatgtgccgtttgctaacgaaatggctgagttgctgttcgggcagttggtgatgttgctgaatcgccatcgttacaccagtgattcgttgccgccaacatccagcgaaacgttgctggataagctgattacccggctggcggctagcctgaaaagtccctttgcgctggataaattttgtgatgaggcatcgtgcagtgagcgcgttttgcgtcagcaatttcgccagcagactggaatgaccatcaatcaatatctgcgacaggtcagagtgtgtcatgcgcaatatcttctccagcatagccgcctgttaatcagtgatatttcgaccgaatgtggctttgaagatagtaactatttttcggtggtgtttacccgggaaaccgggatgacgcccagccagtggcgtcatctcaattcgcagaaagattaattcgccatgccgatgccgacgatgttagcggcgacaataatcaccacacaaccgaggctcaacaccgttaccggacggcgtcctgcattgttccactctttcagcaccagcccgacgataccgccgcacaatacatagaaactcatatgcagcatccaactgatgtagtcatactgcgccggaatgcgggcgtggccccaggcatagaaaaagaattgcagataccacatcaacccgcccagtgtcgagagtaacacattgtgaatgatcagcgattttgccagcgagaagtcggcttttagcgacaaatccttcacttttgccagacgaataaaacagaaaccgaggttaatgatcgcgccgccgcccatgatgacaacatagcttggcagagcgacatacagtggatcgacgccaagtgcggcagcggcttcatgcatcggttttgcggcgttcatcgcaaaggacatcccggcagagaaaatgccgcacatcaccgccagcaccagcccttttttcagattgaactcttcggctttaatgcccatcttgcgctctttcaactgcccggcgcgagttacaatccctacgccaatcagcgccaccagaacgccgagcaacgtcatgcgtccgccttcggtgctaatcaacacatcgaaattgccgttgataattggcgtcatcagcgtaccgacaatcaacgtaatgccaatggcgatgccaattcccatcgacatgccgagataacgcatggtcaggccgtagttgatattaccgatcccccacatagcgccgaacagaaaaacaggcagtcgcgtagagagactaaacgagctgtaatacgcccagaaattcggtagtaacagggcgctgatggcccacggcagaataatccacgaaacaatcccaccgactgaccacatggtttcccatgaccatttttttacttttttgaacggagcgtaaaaacaggctgcactggccgcgccgatcaaatgccaaaatatccccatcgtaatcgcgttactcatcttcttatcctcatcatttttcgtcgcgtcacatctccgacgagatgagtgtaaaaatcgtgctgtcgattaacctttcgcctgttgccgccgttgtcgatttactggcaatcacggcattaagtgggtgatttgcttcacatctcgggcattttcctgcaaaaccatacccttacgaaaagtacggcattgataatcattttcaatatcatttaattaactataatgaaccaactgcttacgcggcattaacaatcggccgcccgacaatactggagatgaatatgagctataccctgccatccctgccgtatgcttacgatgccctggaaccgcacttcgataagcagaccatggaaatccaccacaccaaacaccatcagacctacgtaaacaacgccaacgcggcgctggaaagcctgccagaatttgccaacctgccggttgaagagctgatcaccaaactggaccagctgccagcagacaagaaaaccgtactgcgcaacaacgctggcggtcacgctaaccacagcctgttctggaaaggtctgaaaaaaggcaccaccctgcagggtgacctgaaagcggctatcgaacgtgacttcggctccgttgataacttcaaagcagaatttgaaaaagcggcagcttcccgctttggttccggctgggcatggctggtgctgaaaggcgataaactggcggtggtttctactgctaaccaggattctccgctgatgggtgaagctatttctggcgcttccggcttcccgattatgggcctggatgtgtgggaacatgcttactacctgaaattccagaaccgccgtccggactacattaaagagttctggaacgtggtgaactgggacgaagcagcggcacgttttgcggcgaaaaaataatcatttgccgcctgctgcaatgaggcgtataggccgcatatcagcttaaaaaatgaaccatcgccaacggcggtggtttttttgtgatcaatttcaaaataaaaacaatgatccgataaaaataaaacagcgtttcaattgatgtggttttgatcacttttattgattaaatgaatgtctatcttcgtttccatcaacactgatgctccattgaggaattacgcatcagcccttaaaaatatgccgacaggtgatggaaatgcagataaaacgctcgattgagaaaatcccgggggggatgatgctcgtcccgctattccttggcgcactgtgccacaccttctcgccgggggcggggaaatattttggatcattcaccaacgggatgattaccggtacggtgcccattctggcggtgtggtttttttgcatgggggcgtcaataaaattaagcgcgacgggaacggtactgcgtaaatccggtacgctggtggtaactaaaattgccgtcgcgtgggtggttgcggcaattgcctcgcgtattattccggaacatggtgttgaagttggattctttgccggactttcaacgctggcgctggtggcggcgatggatatgaccaatggcggactttacgcttccatcatgcagcagtacggcacaaaagaagaagctggggcatttgtgttgatgtcgttggagtccgggccgctcatgacgatgattattctgggcactgccgggattgcctcgtttgaaccgcatgttttcgtcggcgcagtattaccgttcctggtgggctttgccctggggaaccttgaccctgaattgcgagaatttttcagcaaagcggtgcaaacgctgattccattctttgccttcgcgctgggcaataccattgatttgactgtgattgcccagactggtttgctggggatcctgttgggtgtggcagtaattatcgtgaccggtattccgttgattatcgccgataaattgattggcggtggcgatggcactgccggaattgccgcttccagttccgcaggggccgcggtagcgacacctgtgctgattgcagaaatggtgcctgcgtttaaaccgatggctccggcagcaacttcgctggtagcgacggcggtcattgtgacttcgattctggtgccaattcttacctctatctggtcacgtaaagtcaaagccagagcagcgaaaatcgaaattttaggtacggtgaaataaacctgcttccttaatccccacagccggatgaactaacgttcgtccggtttgctattgagttcctgcctggatacttaccgcgaaaacagcacgcctgacataaaataaatatggtctaatggggaaatttctcgtggagagggaacagatgcgatatccggttgatgtatacacaggcaagattcaggcttatcccgaaggcaaacccagcgcaattgctaaaatccaggttgatggtgagttgatgctgacggagctggggctggaaggtgacgagcaggcggagaaaaaggttcacggcgggccagacagagcgctgtgtcattatcctcgtgagcattatctctactgggcgcgggaatttccggaacaggcggagttgtttgttgcgcctgcgtttggtgaaaacctctcaaccgacggcctgacggaaagtaatgtttatatgggcgatattttccgctggggagaggcattaattcaggtcagccagccgcgctcgccttgctataaactcaattaccattttgatatcagcgatatagcgcagttgatgcaaaacacaggtaaggtggggtggttgtatagcgtgatagcgccagggaaagtgtctgcggacgcgccgctggagttggtttcccgtgtcagcgatgtgaccgtgcaggaggctgccgccatcgcatggcatatgccgtttgatgacgatcaatatcaccgtttactctccgctgccgggttatcgaaaagctggacgcggacgatgcaaaagcgccgactgagcggcaagatcgaagatttttcccgccggttgtggggaaaataacccccggagtgtaggcctgataagacgctatcagcgtcgcatcaggcatcctgctcaaatgccggatgcggcgtaaacgccttatcctgcctgcaaatgcgaagtttaactccgcttatacagcggcaaccaaatcaccagccgtaaaccgcccagcgggctgtcttctgccttcacccagccacgatgctgctgaatggcggtttcaacaatcgccagccccaaacctgtaccgccagattcacgatcgcgtgcttcatcggtacgatagaacggacggaaaatctgttcgcgatcttccgggctaacgccaggaccatcgtcgtccaccgtaatggtgataccgtctttatctaccgcaaagcccacttcaatcttcgtatgggaataacgcagagcattacgaacaatgttttccagcgcactttccagggcgttcggattgccgtacagcggccacggcccaggcgggaagttaactgtcaacgacttgcccatttgctcggcttcgaacgccgcgttatccagcacttcactccacaactggttggctttgatggtttcgctaaccagcgcgtttttttgctgattacgtgacatcaccaacagatcgttgatcatgctgtccagacgttgcgcttcggtttcaatacgctccagttccttgctttcaccgctacgacggcgcagtaacgccgtacccagttgcagacgcgtcagcggggtgcgcagctcgtgagagatatcagaaagcagacgctgctgagaggtcatcatgcgctccagcgcggtgaccatctggttaaaactggcacctgcggcaaggaattcctgtggccccgcttccagttccgggtgctggcgtaagtttccctgggcaacttcatcggcagcgtttttcagcttacgcgccggttttgccagactccaggccaaccacaacagcagcggcgtactgaccaacatggtgacaatcagcagtaatagcgggcggtcaaacagtaagttaatgaaatcggattgagaactgctggccggacgaatcagataaagttggtaattatcttcgccatcacgcacggagaacggaccgaccagttccacgcggccatactttttcttctgcggatgatcggcgttatcggcctgaccaataaagttacgaatgatctgcatttcgctgcgttcagcgccgatcacgcggccttcggtggtcaccaataacaaacgctgtcctggcggtgcccacttatcaatcgcccggaacagacgccgccaccacattaaatcgttgggcggatcgttcgccagctccgcttcgacatgctgctcaatcatcagcccctgacgctgttcgctatccagaagctcggtcatctggcgtgaatcgagcttgggtaacatcaaaaccaacatcaacaccagcgccagcgtcagccagaagatggcgaagatgcgcgcggttaagctgcctatcatgaagcagaaaccatcagatagccgcgaccacgcaaggttttaaaccacgggtgaccatctttacgatccggcagtttacgacgcaggttggaaatgtgcatatcaatagcgcggtcgaaaggcgtcaggcgtttgcccaacacttcctggcttaaatgttcacgggaaaccacctgacccagatgctgtgccagcaaatagagcagggtaaactcagtaccggttaactccagcgtttgcccgtcgaagctggcttcctgacggcctggattcagcactaaggcatcaacttccagtgtcggtgaaccgttgtcgttgttttgctgttgctcgctccagtgcgaacggcgcaggatcgcgcgaatacgtgccaccagctcacgatcattaaacggtttcgggagatagtcatctgcgcccagctcaaggccgagaacgcgatcaagttcactgccgcgcgccgtcaacataatgacaggcgtctggtgtgtctggcgaagtgcttttaatgtgtcgataccatttttcttcggcatcattacgtcaagcaaaagtaaatcaatgctgtcgtccagaagatcaagcgcctgttccccatcgtgggcaacaatcacgttgaagccttccatctcgagcagctcctttaatagggaagtcagctctcggtcatcatcaactaacaggattttattcattgtttaaatacctccgaggcagaaattacgtcatcagacgtcgctaatccatgactttacgttgttttacaccccctgacgcatgtttgcagcctgaatcgtaaactctctatcgttgaatcgcgacagaaagattttgggagcaaatgatgcgcatagttaccgctgccgtcatggcctcaacgctggcagtcagttcattaagccacgctgctgaagtcggttcaggcgataactggcatccgggtgaagaacttacgcagcgcagacgcagagccatatgttcgacggcataagtttaaccgaacatcagcgtcagcagatgcgagatcttatgcaacaggcccggcacgaacagcctcctgttaatgttagcgaactggagacaatgcatcgccttgtcaccgcagaaaattttgatgaaaacgctgtgcgcgcacaggcagaaaaaatggcgaatgagcaaattgctcgtcaggttgagatggcaaaagtccgcaaccaaatgtatcgcctgttaacgccggagcagcaagcggttttaaacgagaaacatcaacaacgaatggagcagttgcgtgacgtgacgcaatggcaaaaaagttcatcgttgaagctattgagtagtagcaactcacgttcccagtagtaaaccctgttttccttgccatagacaccatccctgtcttcccccacatgctgtgggggttttttttatcctcaatttgcctgctgcttaatgcattgcagatgatttgcttccgttatactagcgtcagttgatagcgggagtatttatgaatcaatcttatggacggctggtcagtcgggcggcgattgctgcgacggcgatggcttcgctgctattgctgattaaaatttttgcatggtggtataccgggtcggtgagtattctcgccgcgctggtggattcgctggtggatatcggcgcgtcgttgacgaatttattggtggtgcgatattccctgcaacctgccgacgataatcactcgtttggtcacggtaaagctgagtccctcgcggcgctggcgcaaagtatgtttatctccggttcggcactattcctgtttttgacgggtattcaacatctgatatctccaacaccgatgacagatccaggcgtcggggttatcgtgacaattgtggcgctaatttgtacgattatccttgtctcgtttcagcgttgggtggtgcggcggacgcaaagccaggcggtgcgggctgatatgctacattaccagtctgatgttatgatgaacggcgcaattctgctggcgctggggttgtcctggtacggctggcatcgcgccgatgctctgtttgcattgggaatcggcatctatattttatatagcgcgttacgcatgggatatgaggcggtacagtcattactggatcgcgcattgcctgatgaggaacggcaagaaattattgatatcgtgacttcctggccgggtgttagcggcgctcacgatcttcgcacgcggcagtcagggccgacccgctttattcagattcatttggaaatggaagactctctgcctttggttcaggcacatatggtggcggatcaggtagagcaggctattttacggcgttttccgggatcggatgtaattatccatcaggacccctgttccgtcgtacccagggagggtaaacggtctatgctttcataatcagtataaaagagagccagacccgcattttgtgtataaaataccgccatttggcctgacctgaatcaattcagcaggaagtgattgttatactatttgcacattcgttggatcacttcgatgtgcaagaagacttccggcaacagatttcattttgcattccaaagttcagaggtagtcatgattaagaaaatcggtgtgttgacaagcggcggtgatgcgccaggcatgaacgccgcaattcgcggggttgttcgttctgcgctgacagaaggtctggaagtaatgggtatttatgacggctatctgggtctgtatgaagaccgtatggtacagctagaccgttacagcgtgtctgacatgatcaaccgtggcggtacgttcctcggttctgcgcgtttcccggaattccgcgacgagaacatccgcgccgtggctatcgaaaacctgaaaaaacgtggtatcgacgcgctggtggttatcggcggtgacggttcctacatgggtgcaatgcgtctgaccgaaatgggcttcccgtgcatcggtctgccgggcactatcgacaacgacatcaaaggcactgactacactatcggtttcttcactgcgctgagcaccgttgtagaagcgatcgaccgtctgcgtgacacctcttcttctcaccagcgtatttccgtggtggaagtgatgggccgttattgtggagatctgacgttggctgcggccattgccggtggctgtgaattcgttgtggttccggaagttgaattcagccgtgaagacctggtaaacgaaatcaaagcgggtatcgcgaaaggtaaaaaacacgcgatcgtggcgattaccgaacatatgtgtgatgttgacgaactggcgcatttcatcgagaaagaaaccggtcgtgaaacccgcgcaactgtgctgggccacatccagcgcggtggttctccggtgccttacgaccgtattctggcttcccgtatgggcgcttacgctatcgatctgctgctggcaggttacggcggtcgttgtgtaggtatccagaacgaacagctggttcaccacgacatcatcgacgctatcgaaaacatgaagcgtccgttcaaaggtgactggctggactgcgcgaaaaaactgtattaatgatttcggaaaaaggcagattcctttaccctgaaaccgatgacagaagcaaaaatgcctgatgcgcttcgcttatcaggcctacatgaattctgcaatttattgaatttgcaaacttttgtaggccggataaggcgttcgcgccgcatccggcatggacaaagcgcactttgtcagcaatatgaggcggatttcttccgcctttttaatccctcaacatatacccgcaagttatagccaatctttttttattctttaatgtttggttaaccttctggcacgctttgctcatcacaacacaacataagagagtcgggcgatgaacaagtggggcgtagggttaacatttttgctggcggcaaccagcgttatggcaaaggatattcagcttcttaacgtttcatatgatccaacgcgcgaattgtacgaacagtacaacaaggcattcagcgcccactggaaacagcaaactggtgataacgtggtgattcgtcagtcacacggtggctcaggtaaacaagcgacgtcggtaatcaacggtattgaagctgatgttgtcacgctggctctggcctatgacgtggacgcaattgcggaacgcgggcggattgataaagagtggatcaaacgtctgccggataactccgcaccgtacacttccaccattgttttcctggtacgtaagggaaatccgaagcagatccatgactggaacgatctgattaaaccgggtgtttcggtgatcacgcctaatccgaaaagctctggtggcgcgcgctggaactacctggcagcctggggctacgcgctgcatcacaacaacaacgatcaggcaaaagcacaggattttgttcgggcactgtataaaaacgtcgaagttctggattctggcgcgcgtggctccactaacacttttgtcgagcgcggaattggcgatgtactgattgcctgggaaaacgaagctctgctggcagcgaatgaactggggaaagataaattcgaaatcgtcacgccgagtgagtctatcctcgcagagccaaccgtgtcggtggtcgataaagtggtcgagaaaaaaggtactaaagaggtggcggaagcctacctgaaatatctctactcgccagaaggtcaggaaattgccgcgaaaaactactaccgtccgcgcgacgctgaggtggcgaaaaagtacgaaaatgcgtttccaaagctgaagttattcaccattgatgaagagttcggcggctggacgaaagcgcaaaaagagcattttgctaacggcggtacgttcgatcagatcagcaaacgctgatttccccaggataattatcaaacccggtggtttctcgcgaccgggttttttatttgtcacgattttgcgttacccttgcatctctttgaggtacagggaaaaaaagatgaaaaaagcgggtcttctttttttggtgatgatagttatcgccgttgtggctgccggtattggttactggaaattaaccggtgaagagtcggatacattacgtaagattgtccttgaggaatgtttgcccaatcagcagcaaaatcaaaatccttcgccatgtgcggaagtcaaacccaatgccggatacgtggttttaaaagatcttaatggcccactgcaatatctgttgatgccaacgtatcgtattaacggtactgaaagtcctttgttgaccgatccttcaacgccgaacttcttttggttggcttggcaggcgcgtgattttatgagcaaaaaatacggccagccggttcccgatcgcgcggtttctttggcgatcaactcccgcaccgggcgtacgcaaaaccattttcatattcatatctcttgtattcgtcctgatgtgcgcaaacagctggataacaatctggcgaacatcagcagccgctggttgccactgccaggtggtttgcgcgggcatgaatacctggcgcgtcgggtaacggaaagcgaactggtacaacgcagcccatttatgatgctggcagaagaagtacctgaggcgcgggaacatatgggacgctacgggctggcgatggtacggcagagtgataactcatttgtattgctggcgacacaacgaaatctactgacgcttaaccgtgcttcagccgaggaaattcaggatcatcagtgtgagattttgcgttaaggcgaagagttaaggaaagtaagtgccggatatgaaatccggcacctgtcagacttaagcctgtttagccgcttctgcagctttaacgattactgcgaaggcgtcagctttcagagaagcaccaccaaccagcgcgccgtcgatatccggctgagcaaacagttctgcagcgttagacgcgtttacagagccgccgtactgaatgatcacttgttcagcgatgttagcgtcaactttagcgatgtggtcacggatgaatttgtgaacagcctgtgcctgagccggagttgcagatttgccagtaccgattgcccatacaggttcgtaagcgataaccgcaccttcgaatgccgcagcaccctgagttttcagtaccgcgtcgatctgacgtgcgcaaacttcttcagttttgcccgcttcattttcagcttcggtttcaccgatgcacagaaccggagtcaggccctgctctttcagcaccgcgaattttttcgcgatcagttcgtcagattctttgtggtaagtacgacgttcagagtgaccgatgatgatgtactgtgcgccgatgtctttcagcatagcagcagaggtttcaccggtgaatgcgccggacaggttcaggtccacgttttgcgcacccagcatgatgtggctgccttcagcttcgcgcttcgccatatcgatatacatttccggtggtgcgattgcaaccgcacagccagcaacacctgccagctctttacgcaggttagaaaccagctcgtgaaccatgtggcggctgccgttcagtttccagttacccatcactaaaggatgtcgcattttaattctccacgcttataagcgaataaaggaagatggccgccccgcagggcagcaggtctgtgaaacagtatagagattcatcggcacaaaggctttgctttttgtcatttattcaaaccttcaagcgattcagatagcgccagcttaatcggttcaacagcgaaggtcagccccttttcgccgttgtccgcgacaacataacgcagtgcaccttctgtctcggtgtaataacgtttgtttttccccgccgttagtagcgactgcagttttttctggctttgtgttttggtcattaatggggtgagtgtgcggatcaccgctgccatgtattcctgagctttcgctttcgcggctttttgctctggcccctggatgggtagccaggtcatttgaatgcttttgatttttaaggtaccgcgctccagcgctgtagaagcatacaagttctcattaattttacttgcagcacgagtgagattggctttgtcgggactgctgtcgatggcacgaaattcgttcagtggcaggctgggattctggctgttaaagtcttctcgaaactggctgatggagagatcgaaagtaggggctccagccagcagataaggcgcggtcgttgccgtatctggtgtttgtgcatgcgcctctgttgtaacggttaatgcagaacataagagaaaaaacagcgtacaccctggcttcattgacagtaccttttgttatgactggctccgattaaaacgatatctgtcgcccttgtcaaaagggtagaatcctggaaaagacaaccatcaaggaacttacatgaccatacagcaatggttattctcatttaaagggcgtattggacgccgtgatttctggatttggataggcctgtggttcgcaggcatgctggtgcttttctcactggcgggtaagaatctactcgatattcagaccgcggcgttttgccttgtgtgcttgctctggccaacagcggcagtaactgttaagcgcttgcatgatcgcgggcgttccggcgcatgggcatttctgatgattgtggcgtggatgctgctggcgggtaactgggcgattttaccgggtgtctggcaatgggcggtggggcgttttgtcccgacgttgattctggtgatgatgcttatcgatcttggtgcgtttgttggcacacaaggcgaaaataaatatggtaaagatactcaggatgtgaagtataaagccgacaataaatcaagtaattaacctttaatatatctcttactgctatttttttccgggattgttatttccacgatgcaaatgacaatacccggaaaatccttctgaactcttcaccttaagcaatatcaaaaaaaatggtaatccataagatcattacttgtttgttcttcccttaacggcgcattattcttaagtcgtaatcgacagagaggcgaatatacagaggtgccctatgaaagatgtcgtagataaatgcagtactaaaggatgtgcgattgatatcggtacggtgattgataacgacaactgtaccagtaagttttcgcgcttttttgccacccgcgaagaagcagagtcttttatgaccaaactgaaagagcttgccgccgctacatcctctgcagatgaaggggccagcgtggcctataagattaaggatctggaggggcaagttgagcttgatgcggccttcactttctcatgccaggccgagatgattatttttgagttatcactgcgttcgttagcttgatggagttgctttagaaggagttaaacatggcttataaacacattggcgtggcaatttccgggaatgaagaagatgccttactggtgaataaagccctggagctcgccagacataatgacgctcacctgacgttaattcatattgatgatggcttaagcgagttgtatccgggtatctacttccctgcaacagaagatattcttcaattgttgaagaataagtcggataacaagctgtataaactgacgaaaaatattcaatggccgaagacaaaactgcgtattgaacgcggagaaatgccggaaacactgctggaaattatgcaaaaagagcagtgcgacctccttgtctgtggtcatcatcactcatttatcaaccgtttgatgccggcatatcgcgggatgatcaataagatgagtgcggatttgctcatcgtgccgtttatcgataagtaaccgcttaccagtaatgctccgctgtcatatggcccggtcggcgacgtaaatgtttcgtcatctgccgggtctctttcagcaactgttgtgtatcgcgcaccatctgtggattgccgcacagcatcacatggctggtttctttattcatcggcaggccaatcgtgctttccagttccccactttcaattaatgccggtatccgtccggtgagcgaccccgctgccgtttcccgactgaccaccgtctgaatgcgcagttttccttcgtagcgtttttccagttcctgcatcagtggcaaatagcttaagtcggcggcataacgtgcggcgtgcaccaggaccagatttttgaagcgatctaaatctttacctagttgcagaatcgataaataagggccaatcgctgtaccggttgccagcatccatagcgtttcgcagtgcggcacttcatcgagcacaaagaatcctgccgcttcgctaaccacctgcacttcatcgcctggtttcagtgccgccagtcgtgggcttaatttgccatcggggacggtgaccaggtaaaactccagatcgggattatcgggcgagtttacataggagtaggcgcgctggacgcgttcgccgtcgatttcaaggccaagcttggtaaattgcccggcggtaaacggaagcacgggggcgtgaacggtgagactaaacagggcgtcggtccagttctgcactttagtgactttgcctgttacccaatcagccatgtttttctcctgttttgattgacttgccttatcttcgttctccgaacaaaaaaattccagtcccgaaggactggaaggctcaatcgatcaaatcaatcagaggatgtgcacctgcatttccgggtctttgcgatccagatagtggatggactgaatgcggcgaatggtgcgtgacttgccgcggatcagcagcgtttcggtagtcgcgatattgcctttgcggctaatgccttccagcagatcgcctttggtaataccggtggcagagaagatgacgttatcgctgcgcgccatatcgcccaggcgcaatactttaccggcttcgatgcccatcgctttgcagcgtgccagctcctgctcgccaatgcgacgattctcttcgttgtcgcctttgacgtcatgacgcgccagcagacgaccgttcatgtcgccatctaatgcgcggatcaccgccgcagaaactacgccttccggcgcgccaccaataccgtacagcacgtcaacttcgctgtctggcatacaggtgagaattgaggccgcaacgtcgccgtccggaatagcaaatacgcgtacgccgagttgctgcatttcagcgataacggcatcgtggcgtggtttagccagaatcgttaccgtcagttcgctcaacggtttgccgagcgccgccgctacattgcgcaggttatccgccagcggcaggttcagatcaatggtgcctttggctcccggcccgacaatcagcttctccatatacatatccggcgcattgaggaagcagcctttatcgcctactgccagcaccgccagcgcgttagcctggcccatcgccgtcatgcgcgtgccttcaatcggatcaacagcaatatctaccgcgtcgccgcgaccagtaccgactttttcaccaatgtagagcatcggtgcttcgtcgatttcaccttcaccaatgacgatggtgccgtcaatgttgacctggttgagcataatacgcatggcgtttaccgccgcgccgtccgcggtgtttttatcgccgcgtcctaaccatttgtagccagccagcgccgctgattcggtgacgcgggaaaattcgatggcaagttctcgtctcatagcaaactctaagcagtaaggaatggcgcgaagtgtagcacaggggaagggagggattattgatgtgtgcggggttgcccccgcacgtttcgggactaccggatgcggcataaacgcttcattcggcatttacattattcgtcgtgttcttcccacgccatcgcgcgtttaaccgcttttttccagcctgcgtaacggtaattacgctcagtggtttcgatgcctggacggaactcgcgctcaatcaccgctttctcttgcagctcgtcgaggttctgccagaagccaaccgccaggcctgcgagataggccgcacccaatgcggtgacttcgcgcacttccgggcgctcaacgcgggtgccgagaatatcggactggaactgcatcaggaaattgtttgctactgcgccaccatccacgcgcagggcgtgcagacggataccagagtcggcctgcatcgcttccagcacgtcacgcgtctgataagcaatagactccagcgtcgcgcgtataatgtggttagcgttcaccccacgagtcagaccgaaaatcgccccgcgcgcatacgggtcccagtacggcgcacccagcccggtaaatgccggaaccacatacacaccattggtgttttgcactttggtggcgaaatattcggaatcgtaggcgtcgttaatcaacttcatttcatcgcgcagccactgaatggatgcgcctgccataaacaccgcaccttccaacgcatagttcacttcgccagtcgggccgcaggcgatggtggtcagcaggccgttttctgatttcaccgctttctcgccagtgttcatcagcataaagcagccagtgccataggtgttcttcgccatcccttctttcacgcacaactgaccaaacagcgcggcctgctggtcaccggcgatcccggagattggaatacgcgtgccgcctttgccgccaatgttagtctgaccgtatacttcggaagaacgacgcacttctggcagcatctcgcgcggaatatccagcacttccagcattttgtcgtcccagtccagggtatggatgttgaacaacatggtacgagaggcgttggtgtaatcggtcacatggacacggccctgagtcattttccagataagccacgtatcaaccgtaccaaacagcaattcaccacgacgtgcacgctcgcgagagccttccacatggtcgaggatccacttcactttggtgccagaaaagtacgggtcaatcaccagaccggtattgctgcggatataatcttctaaaccgtcacgttttaaatgctcgcagatttctgcggtacgacggcactgccagacaatggcgttatagataggcttgccggtttctttttcccagacaatagtggtttcacgctggttcgtaataccgatagctgcaatttgatcggaactgatatcggctttcgccagcacttctaccagcgtggagctttgggtggcccagatttccattgggtcgtgttctacccaacctggttttgggtagatttgctcaaattcgcgctgcgacacgctaatgatattggcatcgtgatccattacgaccgcgcgggagctggtggtgccctggtcgagcgcaacgatatattttttttcagtcatgtttaattgtcccgtagtcatattacagcgaagctttttgttctgaaggagttgtggtttccttttcttccacaacacagatatcgcaaggcaaatggcgaccaatcagtttgcggtaggcaaatgcacctacaatcgcgccaacgatagggccgaaaagcggcaccaggaagtaaggaatgtctctgccgccggtaaaggcgacattgccccagcccgccagccaggcaaagactttcggaccgaagtcacgcgctgggttcatggcaaaacctgtcaatgggcccatagatgcgccaatgaccgcaatcagtagaccaatcagcaagggagccaaagggccgcgtggtacaccgttgccatcgtccgttaacgccaggatcagccccatcagaatagcggtaatcaccatctcaactgcgaaagcctgcacaaaattgatatgaggattagggtaagtagagaaagtgccagccagatcaacactttcaacgctgccgcgaacaatgtgatgagtctgctcgaagtcgaaaaataaattgtagtaaagcccgtaaactaaagccgcagcacagaaagcgccggcaacttgtgaaacgataaaaggaataactttgcgcttgtcgaaacaggcaaacagccacaatgcaatggtaacagcgggattaagatgcgcgccggaaacccctgcggtcaggtagatggccattgccacccccagtccccaaatgacactgatttcccactgaccaaaagacgcaccagcgacttttagtgctgcaacgcaacccacaccgaagaaaatcaacaacccggtaccgaggaattcagcaatgcactggcctttcaaggttgatgtttgactcataatcggatcctgaagagttaatgtttgttgtatgcgtgaaagtcacggacctccacgatgcttgtaggcatgctgtaaacttatcgttaacgagcaaaaacgagaaatatcgaacttaaaatgtgtgtgcctcgtcataaaatgagcgttatcgcgccatttattccatctgattgtacatgatgcatgtttgttagatcattcgcgcaacaaatttattaacattttcgattgatgtggattatgtcaccaggagaaggatgaaaagtgtggcaaaccgtaatctgcaaggcgtgccgctggacagcgatggcgcggcttcatacaatcggagctaactaaagtgcgctcgtatttattaaggcgtcaccggtaatcgggacgaggatttttatccatcaacgccttgcaattcaggagaggtatgacaatgtcattagaagtgtttgagaaactggaagcaaaagtacagcaggcgattgataccatcactctgttgcagatggaaatcgaagagctgaaagaaaaaaacaactcactgtcgcaggaagttcaaaatgcccagcatcagcgcgaagagctggagcgtgagaacaaccatctgaaagaacagcagaacggctggcaggaacgtctgcaggccctgctgggtcgcatggaagaggtctgattacgcttcatcttccgcgtaatttctttactgtgtaggccaacaggtaacgcagaaaaaaggcaccttgcggtgcctttcttatcattcaatatccagcggatcttctgaaagaataatcccggtattgtcggcataaagatggtcgccggagaagaaggtgacaccgccaaaattgacgcggacatcgctttcgccaatgccttcgccagcggcaccaaccggaattgccgccatcgcctggatgccgatatccaactcttccaggtcatctacctgacgcaccgcgccgtaaatgaccagaccttcccattcattttgtactgccagacgcgccagttcagcatcgaccagtgcgcgacgaacagaaccaccgccatcgacgacaagaacacgaccacggccattctgttcgagcagatcgtacagcaacccgttgtcctcgaaacattttaccgtgattatttgtccgccaaacgacgcccgtccgccaaagttggagaacagcggttccacgacgttaacatcttcttgatagatgtcacaaagctcggaagtatcgtatttcataggcttaacattcagttgctgcgagaattttcagtatatcgcgctatgtgggctgttggcaaaatcatcaattgttaattgatatttgtcagttatgctgcccactggcttaggaatatccctaaaacaaacagcaggttagtcagtaacgctcccttgacagtacgttccagcattggtcgcatcgccaccgggtccatttcccgcatcacataacgggcttgcttcaccagtaatggtgccgccagcaggaacagccagccccacaggctatgcagcgaaaagagattaaacagcgccagacacaccagcgagcccatcagcaggcaggcatgataacgacgcgcgttcacttcacctaagcgcaccaccagcgtgtttttgccattttcgcggtcgctattgatatcacgcaggttattaatattcagtactgccgttgccagcaggccgcatgcggtcgccggaaggatcagtgccggaatcaatgtatgagcctgtaaataccagctccccatgacactcaaccagccaaagaaaaccagtacggaaatatcacccagaccgatataaccataaggacgattgcccacggtgtaggtgatagcggcaatgatcgacaacccgccaagaatcaggaaaccgacaaaatcggccagcgtatggcatgccactgcaaccagtgccagcccggagagacagatgagcacgacggtaataatgagcgcccgtttcatctcttgctgggtaatgacccctttttgcatgccgcgtagcggcccaatgcggtcaggtttatcgctgccttttaccgcatcgccgtaatcattggcgaggttagaaaggatctgtaatagcccggcggtaattagtgccagcagggcgaccagcggatcgaagtgaccttgccaccatgccagcgctgtcccgacgataattgcagcaaaggcgagggggagggttttaggtcgtaaactttccagccacgcctgagttcggctaatttgttgttcagtcataatacgcgccaataaaaatggggcctttcagccccatcaaacaatgatgaaaatgattgaacgcgattataggataaaacggctcagatcttcatctgccaccaacgcatccagatgtttgctcacataatctgcgtcaatagtgatattttgaccgcttaaatcgctggcgtcgtaggaaatctcttccattaaacgctccagaacagtgtgtaaacgacgagcaccgatgttttcggtagattcgttcacctgccatgccgcttccgcgatgcgtttaataccggagtcggtaaactcgatatttacgccttcagtcgccatcagtgctttgtactgcacggtgatagaggcattcggctcggtcagaatacgctcgaagtcgctggtggtcagcgcctgcagttcaacgcggattggcagacgaccttgcagttccgggatcaggtcagacggtttcgcaatctggaacgcgccagaagcgataaacagaatgtggtcagttttgaccatcccgtgtttggtggaaacggtgcaaccttctaccagcggcagcaggtcacgctgaacgccttcacgagaaacatccggaccggaagactcgccgcgcttacagattttgtcgatttcgtcgataaacacgatcccgtgctgctcaacagcgtcgatagcgtcttgcttcagctcttccgggttcaccagtttcgccgcttcttcttcaatcagcagcttcatggcgtctttgattttcagcttacgcgctttttgcttctggccgcccaggttctggaacatggactgcagctggctggtcatctcttccatgcccggaggagccataatttcaacgcccatcggtgctgcggcaagatcgatctcgatttctttgtcatcaagctggccttcacgcagttttttgcggaatgcctgacgagcagcggacggttcctgctgctgttcggtctgtccccagttgtttttagcaggtgggatcagcacgtcgagaatacgttcttctgccagttcttcagcgcgataacggtttttctcgatagcctggacgcgtaccattttcacggcggcatcggtcagatcgcgaataatagaatccacttccttaccgacgtagcccacttcggtgaatttggtcgcttcaactttgatgaacggcgcattcgccagcttagccagacgacgggcgatttcagttttaccgacaccggtcgggccgatcatcaggatatttttcggggtcacttcatggcgcagctcttcgttgagctgcatgcgacgccagcggttacgcagagcaatcgccacagaacgcttggcgttgtcctggccgatgatgtgcttatccagttcgctgacgatttcgcgtggggtcatttcagacatgggagatccttacgctttgtagcttaattcttcgatggtgtggaaatggttggtatagatgcaaatgtcgcctgcaatatccaacgccttttcagcaatttcacgggcgctaagttcagtgttttctaacagcgcgcgcgccgcagcctgggcgtaagggccgccggagccgatagcaataagatcgttttctggctgcaccacgtcaccgttaccggtgatgataagcgatgcagtttcatccgcgactgccagcagtgcttcaagtttgcgcagcatgcgatcggtacgccagtcttttgccagctcaacggcggctttgaccagatggccctgatgcatttccagtttacgttcaaacagttcgaacagcgtaaaagcatccgcagtaccgcccgcaaagcccgcgatgactttgtcgttgtacagacggcggacctttttcacgttgcctttcattacggtattgcccaacgtggcctgaccatcaccagcgatgaccacatggccgttacggcgtacgcttactatagttgtcacgagctgaccccttggttacgaatacagagtacaaaccccgtacaaaagtacggggcataatgcaattatagatgggggggattttgagggtttcaacccccggcggcgagccgaatgcagtttgtatgacccgccatcttcaaccgattgagggtgctgtctgcgttctctttgcctttcaccgggccaatgaccacacgattccagccattgttggtggtgattttcgagtcaaagccttcgaacgccagctgagcacgtaccgtctctgcctgttccgcgcctctgaacgaaccgcactgcaccatccagcggcgttcgtcttttttctccgccgtcggttttggcgcgtcagcggcacgagcaactggcgcagcttgctgcggcttcgactgcgcagtcgtgtgcgcaggagtttgcagcagatcctggtacggctgctgagaagaagccggtttagactggcgcggttgcgcctgtaccggtgcggcttgcgacgtacgcgtctgctgctgccagctttgttcagtcgtacgcgactgctgagccaggcgttgctgttccgctaattgctgcgcctgacgttggcgctgtagcgtttgctgacgctgttccggcgtctgttcattccacggaacttcaaccagctgcgttggctgctggcgcatatcagcctgcatttgttcaagaagctgacgttgttctggtgtcagttgctccggcgttttcacttcaccaccggcagaaggttctgtgggcgcacgcactcccggctggcgactttccagctctttaatgtagcgccagcgttcttctggttttggtggtagtccgtttccggtcactttctggctttgcagcgtctcggactcttctttcttgtgatgcgtaatgaagtacagaccaccgataaaggtcacaagaacggcggcagcaatagcgaccatagcgggagaaaccgcaggcagatttcgttgctttttccgtgaggtgctcttttttcgccgcgaaggtgccggttggctgcggcgtacataatctcgttgtgccactatcgtttcgctgtatttattcgttcgtcagcccgccatgttacttaagcggcgggcctttgaccagtcacggcagtcttaaaggtttactttaaggtaacgcgcgtgttgatccccggatgataagttcgcagtccattaaacgagagccactgccaacgtgttgcccctgcatttgatcaagcaataacagcatagcttcccgaccgatttcgtaacgcggctgcgcgatggttgtcagcggcggatcacaaaattgcgtcaggtcgatgttatcaaaaccgattatggaaaggtcttccgggactttcagcccctggcgttttgcctgagaaagtgcgccgagcgccatcacatcgctatggcagaagacagcagtaggcggttgtggaagatcaagcagctgctgcatcgctttgcttccggcttcgaaggtgaagtcgccacgggcgatgtattgcggatcaaccataatgccgcagcgacgcagcgcctgaacatagccttgcaggcggtagtgacacagcggcatctcttcgggaccggctatacagccaatccgtttatgcccttgctcatataaataatttactgcatcaaatgcggcggtcagattgtcgatatgaactgtaggcagctccagctccggtgcaaattcgttcgccatcaccatcggcggcagattacgctgttcctcaatgctggcatcaaacggcagccttgaacccagcaacaacatgccatcaatttgcttggtgatgatcaaatcgataaaggttttttcctgctgattttgatgcgcacagtcgccaatcagcaccagatatccgtgatttgccgccgtaacttcgataccgcgaataatttcgctaaagaagggatcgcagatatccgggacaatcaccagaatggtgcgggattcattacgcttgacgttgcgccccataggctgcggtaaataacccacttcccgggccgctttttcaacccgattacgggtggcctgggagactttatcgggattcattaatgctcgggagacggtcgctgtagagacttttgccttgagggcaacgtctttcatggtcgcggcagtttcctgcttcttcgctttcacactcactcctcgcctggcacgtcaggcgtactacatccatgtttacttcacatcggcaacatttttagcagatagcgcgtgaaaacggttacagaattttcatgaaaagtgtgatgaatattgaatttttcgatccgcctcgcatcgtgagcggtttaaccctcaatcggatcaacatccagcacccatttcaccttacgggaatccggtattgtattgatgagcgccagcgtaccgttaatgatgtgttgcaagcgcacgcgggaagggtgctgcaacaatatctgccagcgccagcgaccgccacgtttaggtgccagagccggaaccggaccgagaacccacagtttctcgtctgccagtgggctggagaggatcagattacgcagttgttgcaggaacaatggcgcgtgctgattgttatgatcttccgcacgcacaatcacatggctggtccacggcggtagctgcatcattcgccgctcagccagcgcctgttcggcaaaggcgtcgtagcctttatagagcaacgtttgcaacagaggatgttccggatggtgcgtttgcagcaccacttcgccctgtttacccgcacgcccggcacgaccggcgacctgggtgtaaagctgagcgaaacgctctgccgagcgaaaatcggcagaaaacagcgcgccgtccacgtccagtaatgcaaccagcgtcacatccgggaaatggtgacctttcgccagcatttgtgtaccaatcaaaatccgcgcgccgccgcgatgtacttctgccagttgctgttccagcgcccctttgcggctggtggtatcgcggtcgatacgagaaatgggcacgccggggaacaacggcgcgagcgtctgttcaagctgttcggtgcccagccccacggggaccaggtgcgtggaaccgcaggaagggcactggcgcggcaccggacgctgactgtcacagtggtggcagcgcagatggtgctgcgcctgatgcagcgtgtagtagtgatcgcaacgtgggcattcggcaatccagccacagtcgtggcacagcagtgcaggcgcaaagccacggcggttaagaaagagaatgacctggttatcagcctgtaaatgctggcgcatacgagtgattaacgccggagccagacctgcctgcaccttctgaccttttaaatccagcacatgttgaattgccggacgcgcattccctgcccgacgggtcaggcgcagcaggcggtattttttctgctggacgttgcataacgtttccagcgcgggcgttgcggagccaagaataatcgggatttgctcgctgtgcgcacgatacaccgccaggtcgcgggcatgatagcgccagccttcctgctgcttgtaggagctgtcgtgctcttcatcaatgacaatcacgccgagatttttaaacggcgtaaacagcgcggagcgggtgccgatcacaatcgccgcctcaccatttttcgctttcagccacgccgaaagacgctcgctgtcgttcaggccggaatgcagaacttccacgggggcattaaaacgttcacgaaaacgggcgatagtttgcggtgtcaggccgatttccggcaccatcaccagcgcctgtttgccctgagcgagcacgttttccagtacgctgagataaacctccgttttaccggaaccggtaacgcccgccagcagccaggcagaaaaagtatctgccgcgctatgaattgcgccaacggcggtggcctgttcggtattcaatcgcaaccgctcaccagaaacggcatagttcgttcgccagtcgctaaactctggtgtttcacttgctaaatcacacagaccttttttgcgtagcgcctgcaacgcggcatcattaaattcgagcgtggcgacctggtcgcgccagattttgccttgccgtaacgccgccagcgcctgttgttgcttgggggagcgtttcaggctgttcagatccaccgcctggccttgttcagtggcaaaccagtaccacatcggcgcgttcgccgcaggccgcccctggcgtagtaaaatcggcaaggcatgaaacagcacatcgccaatcggatgatgatagtaatctgccgcccatagcagcaatcgccagacggagtgagtaaacaccggctcactatccagcacttcgactaccgcttttagctcattgagcggcagttcgctggcatcgctaactgataccacaatcccgatgcgctcctgctgtttgccaaacggcacgcgcacgcgacacccagctttaaccgtcatgccttctggcagcagatagtcaaaggtacgaggaagcggaacgggcaaggcaacgtgggcaacgggcatagcatcatcctgacttgaaattcggtgggttagtatacacattgccgtagaagagtgcggatcagtttgcatacgctggttaatttctgtatgatttcgcgccttcgtacgaaatgatcgtattgaagctatacttttaacatcgcgtggtgtctggcgttagggctggaagagcgacgcggccttaaaccgaggttttcccatgaaaaaagatattcacccgaaatacgaagaaattactgctagctgctcttgcggtaacgtaatgaaaatccgctccaccgttggtcatgacctgaacctcgacgtgtgcagcaagtgccacccgttcttcactggcaaacagcgtgatgttgctaccggtggccgtgttgaccgcttcaacaagcgtttcaacatcccgggcagcaaataagaccggatttccgaaaaaagcgccgcacggcgctttttttgtgcctgaattttggtcgtattaccacgaaaacagcggccattctttggcgaccgtggtgagttgtggcgcatcgaaaacggcttgtggcgagaccaccgtttcctcaagcggaatattcttgccgtaacgttctttgagctttgcctgaacttgtgggctgctcaggtcgaactctttcaacttctgctgctcgcccacgcgcattcccagcgcgttctggtaaaccttccacaccacttccgaacagtactggcgatcgtcgctccatgagaagctgaaatcatacggtttaccgagataacgttttgccgtttgcgccagtttttgctgttgttcaacactcagtccgccttcaacgcggcgaacaacgtatttgcccttttcaccatgggcgatccactgcttgagcggggtgtatttcaccgggccgactgcttcaaaaacgtagggctttttgttgcgtatcaccagcataccggtgtggctataatcggtatgggtcgccagttggatcgctttactttgcgatgagcgagagatctgaaagatgatgtcgccggtttgtggctgccaggcaaaggcaggtacagaaaccagcaggctgaggatcagcagcctgtttttcatagttaaacgtccatgtataaaaagcggtgggtcgcagacaacgtgctcgttgtttatgccggatgcggcgtgaacgccttatccggcctacaagttcgtgcaaattcaataaattgcaatatgacgtaggcctgataagcgtagcgcatcaggcgattccactccgcgccgctcttttttgctttagtattcccacgtctccgggttaatccccatctcacgcatgatctcttttgccgcttccgggatttcgtcgctgcgctctttacgcagatcggcatcatccggcaaaggttgcccggtaaaggcatgcagaaacgcttcgcacagcagctcgctgttggtagcgtgacgcaggttgttcacctgacgacgcgtgcgttcatcggtgaggatttttaacaccttaagaggaatggaaaccgtaatctttttgacttgttcactcttcttgccgtgctcagcgtatgggctgatatattcgccgctccattcagccatgagatacttaatcctcttcgtcaataaattgagaccagaccacacagttgatgtgggtactgaccgtaaacccgcatagtttaccgtacaggcgttaccgtgacatcgtgtaatgcacctgtcggcgtgataatgcatataattttaacggctatttgggatttgctcaatctatacgcaaagaagtttagatgtccagatgtattgacgtccattaacacaatgtttactctggtgcctgacatttcaccgacaaagcccagggaacttcatcacatgacgcgtaaacaggccaccatcgcagtgcgtagcgggttaaatgacgacgaacagtatggttgcgttgtcccaccgatccatctttccagcacctataactttaccggatttaatgaaccgcgcgcgcatgattactcgcgtcgcggcaacccaacgcgcgatgtggttcagcgtgcgctggcagaactggaaggtggtgctggtgcagtacttactaataccggcatgtccgcgattcacctggtaacgaccgtctttttgaaacctggcgatctgctggttgcgccgcacgactgctacggcggtagctatcgcctgttcgacagtctggcgaaacgcggttgctatcgcgtgttgtttgttgatcaaggcgatgaacaggcattacgggcagcgctggcagaaaaacccaaactggtactggtagaaagcccaagtaatccattgttacgcgtcgtggatattgcgaaaatctgccatctggcaagggaagtcggggcggtgagcgtggtggataacaccttcttaagcccggcattacaaaatccgctggcattaggtgccgatctggtgttgcattcatgcacgaaatatctgaacggtcactcagacgtagtggccggcgtggtgattgctaaagacccggacgttgtcactgaactggcctggtgggcaaacaatattggcgtgacgggcggcgcgtttgacagctatctgctgctacgtgggttgcgaacgctggtgccgcgtatggagctggcgcagcgcaacgcgcaggcgattgtgaaatacctgcaaacccagccgttggtgaaaaaactgtatcacccgtcgttgccggaaaatcaggggcatgaaattgccgcgcgccagcaaaaaggctttggcgcaatgttgagttttgaactggatggcgatgagcagacgctgcgtcgtttcctgggcgggctgtcgttgtttacgctggcggaatcattagggggagtggaaagtttaatctctcacgccgcaaccatgacacatgcaggcatggcaccagaagcgcgtgctgccgccgggatctccgagacgctgctgcgtatctccaccggtattgaagatggcgaagatttaattgccgacctggaaaatggcttccgggctgcaaacaaggggtaaaaatgagtgtgattgcgcaggcaggggcgaaaggtcgtcagctgcataaatttggtggcagtagtctggctgatgtgaagtgttatttgcgtgtcgcgggcattatggcggagtactctcagcctgacgatatgatggtggtttccgccgccggtagcaccactaaccagttgattaactggttgaaactaagccagaccgatcgtctctctgcgcatcaggttcaacaaacgctgcgtcgctatcagtgcgatctgattagcggtctgctacccgctgaagaagccgatagcctcattagcgcttttgtcagcgaccttgagcgcctggcggcgctgctcgacagcggtattaacgacgcagtgtatgcggaagtggtgggccacggggaagtatggtcggcacgtctgatgtctgcggtacttaatcaacaagggctgccagcggcctggcttgatgcccgcgagtttttacgcgctgaacgcgccgcacaaccgcaggttgatgaagggctttcttacccgttgctgcaacagctgctggtgcaacatccgggcaaacgtctggtggtgaccggatttatcagccgcaacaacgccggtgaaacggtgctgctggggcgtaacggttccgactattccgcgacacaaatcggtgcgctggcgggtgtttctcgcgtaaccatctggagcgacgtcgccggggtatacagtgccgacccgcgtaaagtgaaagatgcctgcctgctgccgttgctgcgtctggatgaggccagcgaactggcgcgcctggcggctcccgttcttcacgcccgtactttacagccggtttctggcagcgaaatcgacctgcaactgcgctgtagctacacgccggatcaaggttccacgcgcattgaacgcgtgctggcctccggtactggtgcgcgtattgtcaccagccacgatgatgtctgtttgattgagtttcaggtgcccgccagtcaggatttcaaactggcgcataaagagatcgaccaaatcctgaaacgcgcgcaggtacgcccgctggcggttggcgtacataacgatcgccagttgctgcaattttgctacacctcagaagtggccgacagtgcgctgaaaatcctcgacgaagcgggattacctggcgaactgcgcctgcgtcaggggctggcgctggtggcgatggtcggtgcaggcgtcacccgtaacccgctgcattgccaccgcttctggcagcaactgaaaggccagccggtcgaatttacctggcagtccgatgacggcatcagcctggtggcagtactgcgcaccggcccgaccgaaagcctgattcaggggctgcatcagtccgtcttccgcgcagaaaaacgcatcggcctggtattgttcggtaagggcaatatcggttcccgttggctggaactgttcgcccgtgagcagagcacgctttcggcacgtaccggctttgagtttgtgctggcaggtgtggtggacagccgccgcagcctgttgagctatgacgggctggacgccagccgcgcgttagccttcttcaacgatgaagcggttgagcaggatgaagagtcgttgttcctgtggatgcgcgcccatccgtatgatgatttagtggtgctggacgttaccgccagccagcagcttgctgatcagtatcttgatttcgccagccacggtttccacgttatcagcgccaacaaactggcgggagccagcgacagcaataaatatcgccagatccacgacgccttcgaaaaaaccgggcgtcactggctgtacaatgccaccgtcggtgcgggcttgccgatcaaccacaccgtgcgcgatctgatcgacagcggcgatactattttgtcgatcagcgggatcttctccggcacgctctcctggctgttcctgcaattcgacggtagcgtgccgtttaccgagctggtggatcaggcgtggcagcagggcttaaccgaacctgacccgcgtgacgatctctctggcaaagacgtgatgcgcaagctggtgattctggcgcgtgaagcaggttacaacatcgaaccggatcaggtacgtgtggaatcgctggtgcctgctcattgcgaaggcggcagcatcgaccatttctttgaaaatggcgatgaactgaacgagcagatggtgcaacggctggaagcggcccgcgaaatggggctggtgctgcgctacgtggcgcgtttcgatgccaacggtaaagcgcgtgtaggcgtggaagcggtgcgtgaagatcatccgttggcatcactgctgccgtgcgataacgtctttgccatcgaaagccgctggtatcgcgataaccctctggtgatccgcggacctggcgctgggcgcgacgtcaccgccggggcgattcagtcggatatcaaccggctggcacagttgttgtaatttcagaaatttaataatgcccggtactcatgttttcgggtttatggtttctaatgaaatatattgaattatcataggattaggccggattaagcgtttacgacgaatccggcaagaagcaataagtacatggttagtttatatttgcagtccggtttgctttgcataccggattttctttttcttaccatcctgaagttttttcatcttccctgatttttcctcaccatcattggtcatttttcggttgacgcccttcggcttttccttcatctttacatctggacgtctaaacggatagatgtgcacaacacaacatataactacaagcgattgatgaggtaaggtatgagcttttttcacgccagccagcgggatgccctgaatcagagcctggcagaagtccaggggcagattaacgtttcgttcgagtttttcccgccgcgtaccagtgaaatggagcagaccctgtggaactccatcgatcgccttagcagcctgaaaccgaagtttgtatcggtgacctatggcgcgaactccggcgagcgcgaccgtacgcacagcattattaaaggcattaaagatcgcactggtctggaagcggcaccgcatcttacttgcattgatgcgacgcccgacgagctgcgcaccattgcacgcgactactggaataacggtattcgtcatatcgtggcgctgcgtggcgatctgccgccgggaagtggtaagccagaaatgtatgcttctgacctggtgacgctgttaaaagaagtggcagatttcgatatctccgtggcggcgtatccggaagttcacccggaagcaaaaagcgctcaggcggatttgcttaatctgaaacgcaaagtggatgccggagccaaccgcgcgattactcagttcttcttcgatgtcgaaagctacctgcgttttcgtgaccgctgtgtatcggcgggcattgatgtggaaattattccgggaattttgccggtatctaactttaaacaggcgaagaaatttgccgatatgaccaacgtgcgtattccggcgtggatggcgcaaatgttcgacggtctggatgatgatgccgaaacccgcaaactggttggcgcgaatattgccatggatatggtgaagattttaagccgtgaaggagtgaaagatttccacttctatacgcttaaccgtgctgaaatgagttacgcgatttgccatacgctgggggttcgacctggtttataaatagtgtggcttttgtgaaaatcacacagtgatcacaaattttaaacagagcacaaaatgctgcctcgaaatgagggcgggaaaataaggttatcagccttgttttctccctcattacttgaaggatatgaagctaaaacccttttttataaagcatttgtccgaattcggacataatcaaaaaagcttaattaagatcaatttgatctacatctctttaaccaacaatatgtaagatctcaactatcgcatccgtggattaattcaattataacttctctctaacgctgtgtatcgtaacggtaacactgtagaggggagcacattgatgagcacgtcagacgatatccataacaccacagccactggcaaatgcccgttccatcagggcggtcacgaccagagtgcgggggcgggcacaaccactcgcgactggtggccaaatcaacttcgtgttgacctgttaaaccaacattctaatcgttctaacccactgggtgaggactttgactaccgcaaagaattcagcaaattagattactacggcctgaaaaaagatctgaaagccctgttgacagaatctcaaccgtggtggccagccgactggggcagttacgccggtctgtttattcgtatggcctggcacggcgcggggacttaccgttcaatcgatggacgcggtggcgcgggtcgtggtcagcaacgttttgcaccgctgaactcctggccggataacgtaagcctcgataaagcgcgtcgcctgttgtggccaatcaaacagaaatatggtcagaaaatctcctgggccgacctgtttatcctcgcgggtaacgtggcgctagaaaactccggcttccgtaccttcggttttggtgccggtcgtgaagacgtctgggaaccggatctggatgttaactggggtgatgaaaaagcctggctgactcaccgtcatccggaagcgctggcgaaagcaccgctgggtgcaaccgagatgggtctgatttacgttaacccggaaggcccggatcacagcggcgaaccgctttctgcggcagcagctatccgcgcgaccttcggcaacatgggcatgaacgacgaagaaaccgtggcgctgattgcgggtggtcatacgctgggtaaaacccacggtgccggtccgacatcaaatgtaggtcctgatccagaagctgcaccgattgaagaacaaggtttaggttgggcgagcacttacggcagcggcgttggcgcagatgccattacctctggtctggaagtagtctggacccagacgccgacccagtggagcaactatttcttcgagaacctgttcaagtatgagtgggtacagacccgcagcccggctggcgcaatccagttcgaagcggtagacgcaccggaaattatcccggatccgtttgatccgtcgaagaaacgtaaaccgacaatgctggtgaccgacctgacgctgcgttttgatcctgagttcgagaagatctctcgtcgtttcctcaacgatccgcaggcgttcaacgaagcctttgcccgtgcctggttcaaactgacgcacagggatatggggccgaaatctcgctacatcgggccggaagtgccgaaagaagatctgatctggcaagatccgctgccgcagccgatctacaacccgaccgagcaggacattatcgatctgaaattcgcgattgcggattctggtctgtctgttagtgagctggtatcggtggcctgggcatctgcttctaccttccgtggtggcgacaaacgcggtggtgccaacggtgcgcgtctggcattaatgccgcagcgcgactgggatgtgaacgccgcagccgttcgtgctctgcctgttctggagaaaatccagaaagagtctggtaaagcctcgctggcggatatcatagtgctggctggtgtggttggtgttgagaaagccgcaagcgccgcaggtttgagcattcatgtaccgtttgcgccgggtcgcgttgatgcgcgtcaggatcagactgacattgagatgtttgagctgctggagccaattgctgacggtttccgtaactatcgcgctcgtctggacgtttccaccaccgagtcactgctgatcgacaaagcacagcaactgacgctgaccgcgccggaaatgactgcgctggtgggcggcatgcgtgtactgggtgccaacttcgatggcagcaaaaacggcgtcttcactgaccgcgttggcgtattgagcaatgacttcttcgtgaacttgctggatatgcgttacgagtggaaagcgaccgacgaatcgaaagagctgttcgaaggccgtgaccgtgaaaccggcgaagtgaaatttacggccagccgtgcggatctggtgtttggttctaactccgtcctgcgtgcggtggcggaagtttacgccagtagcgatgcccacgagaagtttgttaaagacttcgtggcggcatgggtgaaagtgatgaacctcgaccgtttcgacctgctgtaatctgaccccgttcagcggctgcttgctggcagtcgctgaacgttctttaccagcgtatagtgggcgaacgaaaactacacactggatctctcatgtctgccgcaggaaagagcaacccactggcaatcagtggcctggttgtgctcacacttatctggagttatagctggattttcatgaagcaagtcaccagttacatcggtgccttcgactttaccgccttacgctgcattttcggcgctctcgttttattcatcgtccttttattacgtggtcgcggaatgcgcccgacaccgtttaaatacaccttagccattgccctgttacaaacctgcgggatggttggtctggcgcagtgggcgttggtcagcggaggtgcggggaaggtggcgatcctgagctataccatgccgttctgggtggtgattttcgccgcgttgtttctcggtgaacgcctgcgacgtgggcaatatttcgcgattctgattgccgctttcggcttatttttggtgttgcagccgtggcaactcgatttctcttcgatgaaaagtgccatgctggcaatcctctccggcgtcagttggggggcgagcgcgattgttgctaaacgtctgtatgcccgtcatccgcgcgtggatttattgtcgttaacatcctggcagatgctgtatgcggcgctggtgatgagtgtggtcgctttactggtgccgcaacgtgaaattgactggcagcccaccgtgttctgggcgctggcctacagtgcgattctggcgacggcactggcgtggagcttatggttgtttgtattgaaaaacttgcctgccagtattgccagcttaagcacactggccgttcccgtttgcggcgtactcttttcctggtggctgctcggcgagaatccgggggccgttgaaggtagcggtattgtgctgattgtgctggcactggcgctggtgagccgtaagaaaaaagaagccgtcagtgtaaaaaggatctgaattttttcttcatgtggggcgatctcttatttaacaaaataacgataatgccccaccatccgccagttaaacagcacatcttcttcctgcgcgcctgcgccaatgttatgtatcaccagcggcgtaccgtcgcgggcgaagccatctgaaaccaccccaatatgtgccagcccgttatccagtcgccaggagacaatatcgcccgcttgatagtcactggggttcttgctggtggggcgtgttttatcatggcggctaaaccaggtttccagattaggcacccgacggtgatcgatgttgctgtccgggcgctttaacttccatttttgcgggtactcagcaaaattcttcgccatatcttcgtgaaccagtttctgcaaatcgaccttctggctgcgcaatgcgcggatcaccacatcggaacatacaccgcgttcttgcggaacatcaccgccaggataagtaagctgcacatacgccggatcgtaaaatagcgtgctgccaatttgctgtctggcaccgtctgcgatggcaaggttggtattggcctggatttgtaccacggttggtggaacggcgggagattttaaggagtggctggtaaatgccgttagcaggctgagcagcgccagtgaagctttcatctggttcgtccgtgaaaataagagtcacagattcgaccttccgggctaacgattgttctgtagagaaaatgtccagaagcggataaaaaattcctgaacaacgtgggagtttcagattactggcacagagtgccggatgcggagtgaacgccttatccggcctacaaaagcacgcaaattcaatatattgcagagattgcgtaggcctgataagcgtagcgcatcaggcaattttgcgttcaaactcccggacaagccgggagtttggagtaggttattcccactcttgcaggaaacgctgaccgtactggtcggctaccagcagagcggcgtaaacctgatctggcgtcgcgccgccaggcatgttgtgaatggtttcaccttctgcacatgccgcttctgccacaattcgcattttcgccgggacatcttctttaatatccagttgagcgagagttattggcaaacctaccgcatggctaagggcagctacggtttcgatttcctccaccggcgcattttccagaaccagctgcgtcagcgtaccgaatgccactttttcaccgtgataatagtgatgcgcgtccgggatagcggtcaggccgttatgcactgcgtgcgccgcagccagaccaccactttcaaaaccaacaccgctcaaataggtgttcgcttcaatcacgcgctccagcgccggagtcactacatgctgttcggcagcaagcatcgctttttcgccttcttccagcagggtgttgtagcacagttcagccagtgccagcgcagcctgggtgcacttgccgcccgccatggtggtcgcgccgctacgagagcaggcacgcgcttcaaaccaggttgccagcgcatcgccgatacccgccgctaacagacgtgcaggtgcgccagcgacgattttggtgtcgacaatgaccatattcgggttatttggcaacagcagatagcggtcaaactcaccctcatcggtgtagataacagacaatgcgctgcacggtgcatcggtagaggcgatagtcggtgcgatcgctaccggaacacccatgaaatgtgccagtgctttggcagtatcgagggtttttccgccaccgataccgagaattgcgccacactgcgcagtctccgcgatgccacgcagacggtcgatctcattttgcgaacattcaccgccaaacggcgcaatttctactaccagtccagcatctttaaagcttttctcgacagtggattgagcaaaacctaaaacaaatttgtcacccaccactaaccagcgttctgccagcggcttcaggtattcgcccagacgattaatcacatcagcgccctggatgtatttacccggtgattgaataatgcggtccataattgctcctttagagatgagtagtgccaaatgcggcattccagtcgtgttcgaacttctctatagctgactctaccgcaggggtgttgagcatttgttgcgctacatctaagggcagggtgatggattcacatcctgccagtaaacagtccagcgcctgacgcggcgttttaaagctggctgccagcaccatgctttctggcgcgtgcatttctaacagcgtttgcagctcctgaaccgtacgaatgccgtctccgccctgggcatctacgcggttaacatacggagcaacgtattttgcccctgccagtgcggctaataacccttgtgcggcgctatatacagcagtgccaagtgtagtaataccctcttttttcagtattttaattgctgccagaccttcggaagtcaccgggattttcaccacaatacccggaatagcgtcgcgcaggcgcttcgcttcttccaccatcccctgcgcgtcgcggctcatggtctgagcaaacagaatgccctcatcaccaatcgctttttgcagacgcggcagcacttcccatatggactccttgctggcagcgataatgctcgggttagttgtcaccccggcaatggggaatatgcgtgccagacgttcgacttctgcgacgttagcggtgtccagatacagttccatgatgtttccttttacagttccagttcatgttgcagcaggctggcgatagcgtcggcagaggcggcgttaaccagcgcgttacggaattcttcgtgcatgatgcggcgagcgaggcgcgagaaaatgcgcatatgctgatcgcccgcagcgtgtttgttcagggttaacataatgatgaattgcgcttcatcatcgccccagcgcaccggcgcttgcagacgcgccacgctgatggtggattgctcaatgtgttctgatttgctgtgtggaatggcaaaactaaagcccagaccggtagagaaaacggcctcgcgcgcccacaagtcggcttccagtttacgcggatagcggcagcggcccgccagcagcaggttatcggtcatgcctttgagcacttcttctttgctgcgccagtcgctttccagtgtgatgcactcggcggtgaccagcggtgcgtcttgttgggtcatgcggaattgcgccagcaggtgttctacttccagcgaagtacggcaggccattgcctggttgagcaacttgcggcactcacggctatcaagttgcgccatccgagctttcgccgccggaattgatggtgcgctcatgctgagttcatccagccctaagccgaccagcaacggcagcacggaacctttcgctcccagctcaccgcacagaccaatccatttgccctggcgatgcaccgcttgcacggcgtaatcgagcgcccgcaagaatgccggattcaggctgttgtagtgacgagtaaccttagcgttatcgcgatccaccgccagcagatactgcgtcaggtcattactaccaatactaaagaaatcaatctcttcgcagcattgatcgatgatgaacatcaccgacggcacttccagcatgatgccgagctggattttctcatcaaacggaatgtgttcgttacgtagttgctgtttggcttccgccagtttttctttcacccataagatctcttccattgaggagatcatcgggatcatgattttcaggctgccgtgagcggaggcgcggaggatcgaccgtagctgcgtggtaaacaacgacgcgtactcttcataaatacgcacggcgcgataaccgaggaacgggtttgcctctgcgggaatgttcagataatcaacgggtttgtcgccgccaatgtccatagtgcgcacaataatgctgcgtccgttggcggattccagcgcctgacaaaaaatgttgtacaactcgctttcgcccggtgcgctggtgcgatccatatagagcatttcagtgcggaacaaaccaacgccttccgcaccattgccgaatgcggcctgcgcttccacggagtgagcgatgttagcggcaatttcaatgcggataccgtcagcggtacgggcttgttgggtcagccagacacgctgttgctcacgcagggcgtcctgtacgcgggcttcttgctgataataacgagctacggcttcccctggctcaaccacaatcgccccggcgttgccgtcgatataaatcgtttgttgctgccacggagtaagggcatcaatatccacaccaaccagcgttggaatgttgaacgaacgggcaaggatcaccgtatgtgaggtggtgccgccgcttttgagcaacaatcctttgaggtgatttttatccagttcgaggaactggctgggggtcagttcatcagccatacaaatggcgggctgcgtcagtttgcccggtgccgggaagcgttgctcaccgtagatttgctggagtaactggaagcagacgtcgcgtacgtccagggcacgttcttgcaggtagctgctgctggaacgggaaaactcttcgcaaaagtgattcgcgctggcaacaattgcttcggcgcagcttaatccggcgctgacgcctgccagtaaatgttcgcgcagggaagtatcgccagccagggatcggtgagcttccagaatcgcgctggtagcaccgtcgctatccagcagacgaaactcaatgtttttcagtaccagcgtcaggccgttttccagtgcggattgctcggcgtcaacgcctttggctgcgggaagattacccagcgcattgagatctaaagaagagatcggcgtcagaatgccgcctgcactaccgctgcacacggtgcgggcgcggataatttgcggattcagattggtcagtgaaaccggcagtggttccagttcgtcagatttaacttccgccagcggcgcatcgcagtgggggaattcatcgcgcagccattggcttaaacgctggtgcgcttcctgttcgtcggccccggaaatcagtaactggcagttatcgcccgccagcgtatcggtgccaatcagcgcaagggcgcttttggcgttgccttgcggtcagtgcgcaggttatgccactcaatttgtgatgaaaaagtattacacagcgtttcaacgtggcttgccggacgcgcatgtacgccgttaggtagctcacaaataaattccacaatcagggccattgcctctctcccggtacggttttctgtttacaggataagagcgcacggcaacggcctgccatgtgacaaatctgccaaaagctggacaaatgtaatgtaaccgtcaatttgcgacgcgtctcacaagacgctgttttgcggcatgcttccggtttatcgcaagttatgaggcggatcgcatttttgtactgatattacaaaagtccagtaaatggcctttttatccactgtttgctccgcctgcgattgcctattgtttcctccatcaaaaatatggacatgggctttcgcaagcccgggagcagcttatgaatgagttggtgcagatcctgaaaaatacccgtcagcatttaatgacgggcgtttcacacatgattcccttcgtggtatcgggcggtattttgctggcggtttccgtcatgttgtatggcaaaggcgcagtgccggatgccgtagccgatccaaatctgaaaaaactgtttgatatcggcgttgcgggcttgacgctgatggtgcctttcctcgcagcgtacatcggttattccattgcagagcgttctgcgctggctccgtgcgctatcggtgcctgggttggtaacagctttggtgcgggcttctttggtgcactgatcgccgggattatcggcggcatcgtggtgcattacctgaagaaaattccggtgcataaagttctgcgctcggtgatgcctatcttcattattcctatcgtcggcacactgattaccgcaggcatcatgatgtggggcttgggcgagcctgtaggggcgttgaccaacagcctgactcagtggcttcaggggatgcagcagggcagcattgttatgctggcggtgatcatgggtctgatgctggcgttcgatatgggcggtccggttaacaaagtggcctatgccttcatgctgatttgcgttgctcagggtgtttataccgtggtggccatcgctgccgtgggtatttgtatcccgccgctggggatggggctggcgacgctgattggtcgtaaaaatttctccgcagaagagcgcgaaaccggcaaagcggcactggtgatgggctgtgttggcgttactgaaggggcgattcctttcgccgctgccgatccgctgcgtgtcattccttccatcatggtcggttcagtttgtggtgcagtaactgcggcgctggtcggtgcgcagtgctatgcaggctggggtggtctgattgtgctgccggtggttgaaggcaagctgggttatatcgcagcagtggctgtcggagcagtggtgacggctgtttgtgtgaacgtgctgaaaagtctggcgcgtaaaaatgggtcttcgactgatgaaaaagaagacgacctggatttggattttgaaattaattaattgaggaacgagccatgacgaaaattattgcagtaaccgcatgtccttcaggtgttgcccatacctatatggcagcagaggcgctggaaagtgccgcgaaagcgaaaggctgggaagtgaaagtagaaacccaggggtcaattggtctggaaaatgaactgactgcggaagatgtggcgagcgctgatatggtgattctgaccaaagatatcggcatcaagtttgaagagcgttttgctggcaagaccatcgtgcgcgtcaacatcagcgatgcagtaaaacgtgctgacgccattatgagcaaaattgaagctcacctggcgcaaaccgcttaagttcttctcccgctcgcaagggcgggttcgctttcccacaggagttcctcatgacgaatcgtatctctcgcctcaaaactgcactgtttgccaatacccgtgaaatctcgctggagcgggcgctgctttataccgccagccatcggcaaaccgaaggcgaaccggtgatattgcgccgggcgaaagcaacagcgtatatccttgaacatgttgaaatttcgattcgtgatgaagaactgattgccggtaaccgcaccgtaaaaccgcgcgccgggattatgtcgccggaaatggacccttactggctgctgaaagagctggatcaattcccgacgcgtccgcaggaccgctttgctatcagcgaagaagataaacgtatctaccgtgaagagttgttcccgtactgggaaaaacgttcgatgaaagatttcatcaacgggcagatgacagatgaagtaaaagccgcgaccaacacgcagattttcagcatcaaccagacggataaaggccaggggcacattattattgattacccacgcctgttgaatcacgggctgggtgagctggtggcacagatgcagcaacattgtcagcaacagccggagaatcacttttatcaggccgcgttgttactgctggaagcctcgcagaaacacattttgcgttacgccgaactggcggaaacgatggcggcaaactgcacagatgcccagcgtcgcgaagagctgctgactattgcagagatctcccgccataacgcgcaacataagccgcagacgttctggcaggcgtgccagttattctggtacatgaacatcattctgcaatacgaatccaacgccagttcgctatcgttggggcgcttcgaccagtatatgttgccgttctatcagacatcattaacccagggcgaagatgcggcgttcctgaaagaactgctcgaatctttatgggtgaaatgcaacgacatcgtgctgttgcgctccaccagtagcgcgcgttatttcgccggtttcccgaccggctataccgcactgctcggcgggttaaccgagaacggacgtagcgcggtgaacgtgctttcgttcctttgccttgacgcctatcaaagcgtgcaattaccgcaaccgaacctcggcgtgcgcactaacgccttgatcgacacgccgttcctgatgaaaaccgccgaaaccattcgcttcggtaccggtattccgcaaatctttaacgatgaagtggtggtgccagcgttcctcaaccgtggcgtttcgctggaagatgcgcgcgactattccgtagtgggctgtgtggaattatctattcccggcagaacctacggcttgcatgacatcgcgatgtttaatctgctgaaagtgatggaaatctgcctgcatgaaaatgaaggcaatgctgcgctgacttatgaaggtttactggagcagatccgcgccaagatcagccactacatcaccctgatggttgagggcagcaatatttgtgatatcggccatcgcgactgggcacctgtaccgctgctctcatcgtttatcagcgattgtctggaaaaaggccgcgatattaccgatggcggcgcgcgttataacttctccggcgtacaggggatcggtatcgccaacctgagcgattctctccatgcgttgaaagggatggtttttgagcaacagcgtttaagttttgacgaattgctgtcggtattaaaagccaacttcgcaacgccagaaggcgaaaaagtccgcgctcgcttaattaaccgcttcgagaaatacggtaacgatatcgacgaggtggataacatcagcgccgaactgttgcgccactactgcaaagaagtggaaaaataccagaacccgcgcggcggctacttcacgccgggatcgtataccgtttctgctcacgtcccgttgggatcggtggttggcgcgacgccagacggtcgttttgccggagaacagctggcagacggcggcttgtcacccatgctgggccaggacgcacaagggccaacagcggtactgaagtcagtcagtaagctcgataacacgctgctgtctaacggtacgttgctgaacgtgaaattcactccggcgaccctggaaggtgaagcaggattacgcaaactggccgacttcttacgggcgtttacccagcttaagttacaacatattcagtttaacgtggtgaacgccgacacgttgcgggaagcgcaacagcgcccacaagattatgccgggctggtggtgcgcgttgccggatacagcgccttctttgtcgaactgtcgaaggagatccaggatgacatcatccgccggacagcgcatcagctgtaacgttgtggaaacgcgccgcgatgatgtggcgcgcattttcaacattcagcgttattcactgaatgacggcgagggcattcgtacggtggtcttttttaaaggctgtccgcatctttgcccgtggtgtgctaatccggagtcgatctccggcaaaatccagacggtacgcagagaggcgaaatgtctgcactgtgcgaaatgtttgcgtgatgcggatgaatgcccctccggggcgtttgaacggattggtcgcgatatcagccttgacgctctggaacgggaagtgatgaaagatgacattttctttcgcacgtccggcggcggcgtcacgctttctggcggcgaagtgttaatgcaggcggagtttgctacccgttttttacagcgactgcggctgtggggtgtgtcatgcgccattgaaactgccggagacgcaccagccagcaagctattaccgctggcgaaattgtgcgatgaagtgttgttcgatttaaaaattatggacgcgactcaggcgcgggatgtggtgaagatgaacctgccacgcgtgctggagaatctgcgtttgctggtgagtgagggcgtcaacgtgatcccgcgtttaccgctgatccctggtttcacgctcagccgggagaatatgcagcaggcgctggatgtactgatcccgctgaatatcaggcagatccatctgttaccgtttcatcagtacggcgaaccgaaataccgcctgctggggaaaacatggtcgatgaaagaggtgcctgcgccgtcgtcagctgatgtggcaacgatgcgcgaaatggcagaacgggccggacttcaggttaccgtgggaggttaaaatggcatacctggtggcagtaaccgcctgcgtaagcggcgtggcgcatacttatatggcggcggaacggctggaaaagttgtgcctgttagagaagtggggagtcagcattgaaactcagggcgcgctgggaacggagaatcgtttagcggatgaggatatccgccgggcggatgttgctctgttgattacggatatcgagcttgccggtgccgagcgatttgaacattgccgctatgtgcaatgcagcatctacgcattcctgcgtgagccgcagcgggtaatgagcgcggtgcgcaaagtgctttctgcgccgcagcaaacccatcttattctggagtagtcggtttttctgtcagttggctgtggtactgccggcgatattccgacggcgagcgttcggtgtttttacgaaacagacggcagaagtagttgctgtcgacaaagccgcaggcgtgcgccacttcttttaccttcaggtcatagcctttcaataacgtcttagcgtgctccagtcgcgtgtgattcaggtattcgttaaaaccaatggcccccgttttttgaaacaggtgcgagaggtaatttggcgaaatataaaacgcctgtgcaacagattcgcgggtaagcgcggaggcatagcgttcgtcgatataatcgcgaatagcttcaaatagtgcctggctgcgtgaggcggtctggatttggctgccaagcaaatcgcggcagtggctaagcaggctggcgacgataagccttgccgtttgctgctcctgcggctgcatttgcatttcattgagcgtttgtagcagaaaagaacctatgcgtgggccgcgtcgggcgacgtgttgcttcgccagattttgatattgtttgccatcccattgcacgacgctgaagccgagttgctgtttgccaaacagcacgctaaaggtagtagcgggggcttgccattgtggaaaattccagccaccagcaggaacgtacagcacatcgccgggaactaacgttgctccagcgccggtatcaacaaactcaccttccagcacaatttccagccgtggaaaatcgacctgatacgcaagatcgggcaccgggccgttactgctggcaaagtaaatctggcgcagggacagcgggccgttgatcaggcgggagagcagatagctgacgtcgtgatacatgttattcccttaggtatgtagacgggaaaacagtaactggcattattaaaaaaggccacctgaaaagtgtggcctgaggggagttcgatgtaaacattgcggcagttgtattgccggatgtggcgtaaacgccttatccagcctaccgccgcgatctgtaggccggataagacgcgtcaagcgtcgcatccggcaaatagcgcctggctgataattactgattacccacctgatcgccatagggcagtgtgtcgtaatcgatcagtgcgtttttcttatacgggttaccaatccagcgggtagtttctttgaactgcggattcaccactgaacgggttggatcgtaaccgtcgtaagataagcccgccaaatctgaccaggtgtggatcagttccgccaggctgtatttacgatcaacatcctgcgagaaatcacggggatgagtcgcttgccatttttctgacgtccacagcaggaacggaatggtgtacatatgacgcgtcgggttgtcctcattacgcccctgagttttgtgcggcggcgtgtcgtaaacctcttcaccgtggtcagagaaataaaccaggaaaccgttcgggtttgctgctttaaagtctttaatcaggctggcaaccacatgatcgttatacaggttagcgttgtcataatcgttatatgactccagctcttccgcgtttaatcccggcggaacatgatcggtattgccatcaaacttgccctgattttccgggtagcggtatttgtatttgatatgcgtacccagcagatgaacaatgatcagtttcttcggcgcagggtcattcagcacttcctggaacggcttcagcacgttggtgtcgtattcacgcgcactctgcgtacgttgctggttcatgtagtactgcttgtcggtctggcgcgaaaataccgtcagcatggtattgcgggcggtcatcgtctgctggttggtgatccagaaggttttataacccgcctgtttcatcatgttcatcagcgacggctgcgtcagatacagatccgggttcttttcattggcaaaggtcagcgcctgttgcaggatttcaatggtgtacggacgagacgtaactacgttattaaacacggtcagattcggatcggttttatgcagcgcatccagctccggcgtggtttcacgcggataaccgtacagactcatgcgtccgcgctgggtcgactcgccaatcaccagcactaaagtgcgcggttcgttacccgattcatctttgaaattagccagtggcggcaaggcattattttcattcagtaactttgttagcgagtttagttgctgacgatactgataatagccggtcaggaattgccacggtgcggcaggctccatacgcgaggccaggttatccaacgttttctcaaacggcttgtttttgataaacgtattcatggcgatcggatgcagaatcaagccataaagcagggcaaaagagacaacataacgccacggctttggaatatagaccgggcgcaggcgtgtccacagcagaactgccaccgccgtataggccagcgcgataagcacaattttcaggctgaaatactggcttaaatactcgctggcttcgttggtgttggtttcgaacatcacaaacagaacgctctgcgagaactcctgaccgtagatgacgtagtagcacagcgccgccagagaggccgcccatagcaccacgccgattactgcggcaataattttaatccgcttcggaaagaggaataccgggatcaaccacagcgaactgaataacagcgagtcgcgaatgccgttagtgccactataaccactgatgtaaataatggcctgtagcagagtagagaaaaaccaaaagtagagcagtgcccaacccagggctttccagctaaaaagaggtttagcctggacttctgtggaatgcatagtaagaacctgtcttgaaaaaatatcgccgaatgtaacgacaattccttaaggatatctgaaggtatattcagaatttgaataaaatgcagacagaaatatattgaaaacgagggtgttagaacagaagtatttcagaaaaccctcgcgcaaaagcacgagggtttgcagaagaggaagattagccggtattacgcatacctgccgcaatcccggcaatagtgaccattaacgcttgttcgacgcgaggatccggttcctggccttctttttctgcctggcgggagcggtgcagcaactcggcctgcaatacgttcagcgggtcggtgtaaatattccgtagctgaatagactctgcaatccacggcagatcggccatcagatgggaatcgttggcaatcgccagcaccactttgatgtcttcttcttgcaggttgcgtaactctttacctaacggccacagtgctttgtctaccaggcgttggtcatagtattccgccagccacaggtctgctttggcgaagaccatctccagcatgccgagacgcgtcgagaagaatggccaatcgcggcacatagcctccagctcgctctgtttgccgtcttcgaccactttttgcagcgccgtacctgcacccagccaggcggggagcatcagacggttttgcgtccaggcgaagatccacggaatggcgcgtagtgactcgacgccgccggttgggcgacgtttcgccggacgtgaacccaacggcagtttgcccagttcttgttccggcgtagcggagcggaagtaaggcacaaaatctttgttttcacgtacgtagccgcggtagacatcgcaggagatgactgacagttcatccataatgcgacgccagctctctttcggctccggcggtggcagcaggttggcttccagaatcgccccggtataaagcgacaggctgctgacggtgatttctggcagaccatatttaaagcggatcatctcgccctgttcggttacgcgcaggccgcctttcaggcttcctggcggttgtgacagcagcgccgcatgagcaggtgcgccgccgcgaccaatggaaccgccgcgaccgtggaacaacgtcagctcaatacccgctttttcgcaggttttgattaatgcatcctgtgcctgatattgcgcccaggaagctgccatcactcccgcatcttttgctgagtcggaatagccaatcatcaccatctgtttgccctgaatcaggccacgataccagtcaatattgagcagctgggtcatgacatcgttggcgttgttcagatcatcgagggtttcaaacagcggagcaaccggcatcgcaaacccgatacccgcttctttcagcagcaggtggacagccagtacgtcggacggcgttttcgccatcgagatcacgtaggcggcaatggagccttgcggtgcttcggcaatcacctggcaggtatcgagcacttcgcgcgtttcggcgcttggttgccagttgcgcggcagaagcggacgtttggagttcagttcgcggatcaggaacgcctgtttgtcggcctctgaccagctttcgtagtcgccgataccgaggtagcgggtcagctcgcccagcgcttcggtatgacgcgtgctctcctgacggatatcaatacggaccagcggtacgccgaaacatttcacgcggcgcagggtgtcgagcagatcgccgttggcgataatacccatgccacacgcctgaagtgactggtagcaagcgtagagcggttcccacagttcttcgttttgtgtcagcaggccttctggttttggcagttcttcgcctttcaggcgcgcttccagccatgcctgtgtcgccatcaggcgagaacgcaggtttttcatcagatagcgatacggttctgcggcaccttcttcgccaaccagcgccagcagttcaggggtcgcttcaaccatcgacagttcagaaaccagcacctgaatatctttcaggaacaaatcggtggctttccagcggctgagtagcaggacgtggcgggtgatatcggcagtgacgttcgggttgccgtcgcggtcgccgcccatccacgaagtaaaacggaccggaacaaattcgacgggcagtttgtagccgaggttctcttccagttgttcgttcagttcgcgcaggtaatttggtacgccttgccacaggctgttttccactacggcaaagccccatttggcttcatctaccgggcttggacgcagcttacggatttcatcggtatgccatgactgggcgatcaactggcgcaggcgacgcatcagctggttgtgttcgtagtcagcgatatctttgttatcgagctgttttaaacaggcgttcacttccaccattttgtggatcagtgtacgacgggtaatttcggttgggtgagccgtgaggaccagttccagcgacagcgattccactgcttttttgatggtgtcttcgctcagttccggctggtttttcagtttacgcagggtgcgggcgatcacttccgggttgctggcagcttcgcctttcggcgaaatgctgtggtattgctcggcggtgttggccaggttcaggaactgactaaacgcacgcgcaacgggcagcagctcgtcgttcgacaaattttgtaaggtggtgagcaactcctggcggttagcatcattgccagcgcgtgaagatttcgacaacttacggatagtttctacgcgttcaagaatgtgttctcccaacgcatccttgatggtttctcccagcactttgccgagcatactgacattactacgcaatgcggaatattgttcgttcatattaccccagacaccccatcttatcgtttgatagccctgtatccttcacgtcgcattggcgcgaatatgctcgggctttgcttttcgtcgtcttttataaagccacgtaaaagcggtgacgtcaaatgctgcgaaatcgcttcagcaaacgaataaatagcaggaatttacgtcattaaattcacgacgctttaaataagcgtaacttatggaaatgttaaaaaatcgccccaagtaacaccaaaggtgtaggtcggataagatgcgcaagtatcgcatccgacattattgcggcactggagtttggcaacagtgccggatgcggcgcgagcgccttatccggcctacagttgggcatcgtttgagtcactgtcggtcggataagatgcgcaagtatcgcatccgacattattgcggcactggagtttggcaacagtgccggatgcggcgcgagcgccttatccggcctacggttgggcatcgtttgagtcactgtaggtcggataagatgcgcaagcatcgcatccgacattattgcggcactggagtttggcaacagcgccggatgcggcgcgagcgccttatccggcctacgttttaatgccagcaaaaatggtgaattacctgggttatcagttcgcgggtgggcttgataaaccgtgtttccagatattcatcaggttgatgagcctgattaattgagccaggccccaacaccagcgtcgggcataacgtttgaataaacggcgcttcggtacagtagttcaccacttcggtttttgctccgagcaatttctcaaccacttcaaccagttgatgattcggtgggcattcatagccagggatcggcggatgcagctcgtcgaccgtcagacgacccggccagcgttcgctcaccggagccaatgcatcgttgagcaaaccattaagttcattgagtgtcatgccaggcagcggacgaatatccatatgcaactcacagcaagcgcaaatacggttagaagcgtcgccaccgtgaatatgcccgaggttgagcgtagggtatggcacggtaaacgcttcgtagtgataacgttctttcaggttatcgcgcaattgcaaaatatgcccgatggcgtcgtgcattagttcgatagcgttaactccgcgtgctggatcgctggagtgccccgactggccctgaatacggatggcgttagagatatgacctttatgtgcgcgtaccggttgtagtgacgtcggttcgccaatgatggcgcaatccgggcgcagggcggtagtttcggcaaaataacgcgctccggccatactggtttcttcatcagcagtcgccagaatgtagagcggttttttcagtttcgtgacgtcgacatcgcgtagcgcatcaaggataaacgcaaaaaagcctttcatgtcggcggtgcctaagccgtaaagcttgccgtcatgctccgtcagtgtaaacggatcgcgcgtccagcgaccgtcatcaaatggcaccgtatcggtatgccccgccagcaacaagccgccagccccctgtccgatacttgccagcatattgaatttgttgcgagttcctggaacaggctgcacttccacattgaagcccaaatctttaaaccagtccgccagcagagtgattaaatctgcattgctttgatcgagtgcctcttccgtggcgcttattgaaggtgtggcaatcagagcgcggtaaatctcgataaatggcggtaatttgtttttcattgttgacacacctctggtcatgatagtatcaatattcatgcagtatttatgaataaaaatacactaacgttgagcgtaataaaacccaccagccgtaaggtgaatgttttacgtttaacctggcaaccagacataagaaggtgaatagccccgatgttgaatacgctgattgtgggtgccagcggctacgctggcgcagagctagtgacctatgtaaatcgccatccgcatatgaacataaccgctttgactgtttcagcgcaaagcaatgatgcgggaaagttaatctccgatttgcatccgcagctaaaaggcatcgttgatctgccgttgcagccgatgtcggatatcagcgagtttagcccaggggtggacgtagtgtttctcgccaccgcccatgaagttagccacgatttagcgccgcagtttcttgaagcgggctgcgtggtgttcgacctttccggcgcgtttcgtgttaacgacgccaccttctatgaaaaatattacggctttacccatcaatacccggaactgttggaacaggcagcctacggtctggcggagtggtgcggtaataaattaaaagaagcgaatttgattgcggtgccgggctgttatccgacggcggcacagctggcgctgaaaccgttgattgatgccgatcttcttgacctcaatcagtggccggtgatcaacgccaccagcggcgtgagcggtgcagggcgtaaagcggccatttcaaacagcttttgtgaagttagcctgcaaccgtatggcgtctttactcatcgccatcaaccagagatcgccacacacctcggtgctgacgttatcttcaccccacatctgggcaatttcccgcgcggcattctcgaaaccattacctgccgcctgaaatcgggtgtgacccaggcgcaagtcgcgcaagtgttacagcaggcgtatgcccataaaccgctggtgcggctgtatgacaaaggcgttccggcgctgaaaaatgtcgttgggctgccattttgcgatatcgggtttgccgttcagggcgagcatctgattattgtggcgaccgaagacaacttactgaaaggcgcggcggcacaagcggtacagtgcgccaatattcgtttcggctatgcggaaacgcagtctcttatttaagggtgcaatgatgaatccattaattatcaaactgggcggcgtactgctggatagtgaagaggcgctggaacgtctgtttagcgcactggtgaattatcgtgagtcacatcagcgtccgctggtgattgtgcacggcggcggttgcgtggtggatgagctgatgaaagggctgaatctgccggtgaaaaagaaaaacggcctgcgggtgacgcctgctgatcagatagacattatcaccggagcactggcgggaacggcaaataaaaccctgttggcatgggcgaagaaacatcagattgcggccgtaggtttgtttctcggtgacggcgacagcgtcaaagtgacccagcttgatgaagagttaggtcatgttggactggcgcagccaggttcgcctaagcttatcaactccttgctggagaacggttatctgccggtggtcagctccattggcgtaacagacgaagggcaactgatgaacgtcaatgccgaccaggcggcaacggcgctggcggcaacgctgggcgcggatctgattttgctctccgacgtcagcggcattctcgacggcaaagggcaacgcattgccgaaatgaccgccgcgaaagcagaacaactgattgagcagggcattattactgacggcatgatagtgaaagtgaacgcggcgctggatgcggcccgcacgctgggccgtccggtagatatcgcctcctggcgtcatgcggagcagcttccggcactgtttaacggtatgccgatgggtacgcggattttagcttaagttttgttggccggaggcgcagctttccggcattgaatttcaaaataaggaaacagagttatggcactttggggcgggcgttttacccaggcagcagatcaacggttcaaacaattcaacgactcactgcgctttgattaccgtctggcggagcaggatattgttggctctgtggcctggtccaaagccctggtcacggtaggcgtgttaaccgcagaagagcaggcgcaactggaagaggcgctgaacgtgttgctggaagatgttcgcgccaggccacaacaaatccttgaaagcgacgccgaagatatccatagctgggtggaaggcaaactgatcgacaaagtgggccagttaggcaaaaagctgcataccgggcgtagccgtaatgatcaggtagcgactgacctgaaactgtggtgcaaagataccgttagcgagttactgacggctaaccggcagctgcaatcggcgctggtggaaaccgcacaaaacaatcaggacgcggtaatgccaggttacactcacctgcaacgcgcccagccggtgacgttcgcgcactggtgcctggcctatgttgagatgctggcgcgtgatgaaagccgtttgcaggatgcgcttaagcgtctggatgtcagcccgctaggctgtggcgcgctggcgggaacggcctatgaaatcgaccgtgaacagttagcaggctggctgggctttgcttcggcgacccgtaacagtctcgacagcgtttctgaccgtgaccatgtgttggaactgctttctgctgccgctatcggcatggtgcatctgtcgcgttttgctgaagatctgattttctttaacaccggcgaagcggggtttgtggagctttctgaccgcgtgacttccggttcatcattaatgccgcagaagaaaaacccggatgcgctggagctgattcgcggtaaatgcggccgggtgcagggggcgttaaccggcatgatgatgacgctgaaaggtttgccgctggcttacaacaaagatatgcaggaagacaaagaaggtctgttcgacgcgctcgatacctggctggactgcctgcatatggcggcgctggtgctggacggcattcaggtgaaacgtccacgttgccaggaagcggctcagcagggttacgccaacgccaccgaactggcggattatctggtggcgaaaggcgtaccgttccgcgaggcgcaccatattgttggtgaagcggtggtggaagccattcgtcagggcaaaccgctggaagatctgccgctcagtgagttgcagaaattcagtcaggtgattgacgaagatgtctatccgattctgtcgctgcaatcgtgcctcgacaagcgtgcggcaaaaggcggcgtctcaccgcagcaggtggcgcaggcgattgcttttgcgcaggctcggttagggtaagaacatttatatgtataaatttgagcctggcttatcgccgggcttttttatggcaaaaaaaagcggatcctggagatccgcaaaagttcacgttggctttagttattcgagttgagaaactctcgaaacgggcagtgacttcaagggttaaaagaggtgccgctccgtttctgtgagcaattatcagtcagaatgcttgatagggataatcgttcattgctattctacctatcgccatgaactatcgtggcgatggaggatggataatgaatattcgtgatcttgagtacctggtggcattggctgaacaccgccattttcggcgtgcggcagattcctgccacgttagccagccgacgcttagcgggcaaattcgtaagctggaagatgagctgggcgtgatgttgctggagcggaccagccgtaaagtgttgttcacccaggcgggaatgctgctggtggatcaggcgcgtaccgtgctgcgtgaggtgaaagtccttaaagagatggcaagccagcagggcgagacgatgtccggaccgctgcacattggtttgattcccacagttggaccgtacctgctaccgcatattatccctatgctgcaccagacctttccaaagctggaaatgtatctgcatgaagcacagacccaccagttactggcgcaactggacagcggcaaactcgattgcgtgatcctcgcgctggtgaaagagagcgaagcattcattgaagtgccgttgtttgatgagccaatgttgctggctatctatgaagatcacccgtgggcgaaccgcgaatgcgtaccgatggccgatctggcaggggaaaaactgctgatgctggaagatggtcactgtttgcgcgatcaggcaatgggtttctgttttgaagccggggcggatgaagatacacacttccgcgcgaccagcctggaaactctgcgcaacatggtggcggcaggtagcgggatcactttactgccagcgctggctgtgccgccggagcgcaaacgcgatggggttgtttatctgccgtgcattaagccggaaccacgccgcactattggcctggtttatcgtcctggctcaccgctgcgcagccgctatgagcagctggcagaggccatccgcgcaagaatggatggccatttcgataaagttttaaaacaggcggtttaaaccgtttaacgcagctacccgataggcttccgccatcgtcgggtagttaaaggtggtgttgacgaagtactcaatagtgttgccgccacctttctgttccataatcgcctgaccgatatgaataatttcggcagcgcgctcgccaaagcagtgaatacccagaatctcttttgtttcccgatggaacaaaattttcagcgtgcccacgttcatgccgacgatttgtgcgcgtgccagatgtttaaactgggcgcggcccacttcatatggcactttcattgcggtcagctgctgttcggttttgcccacagagctgatttccgggatggtgtaaataccggtagggatatcttcaatcagatgtgcggtggcttcgccttttaccagcgcctgcgcggcaatgcgcccctggtcataggccgccgacgccaggctcggataaccaatcacgtcgcccaccgcgtaaacgtgtggctgtgcggtctgatacatgctgttgaccttcagctgtccgcggctgtcagtttctagcccaatgttctgtaacgccagcgaatcggtattaccggtgcgaccgttggcatagagcaggcagtcagctttcagttttttacccgacttcagatgcatgatcacaccatcgtcacagccttcgatcttctcgtactcttcgttgtgacgaatcactacgccactgttccagaagtgataggagagagaatctgacatctcttgatcgagaaatgccagcaggcgatcgcgggtgttgatcagatccacttttacatccataccgcggaagatcgacgcatattcacagccgatcactccagcaccatagataagtacatggcgcggttcgtggtgcatgctgagaattgagtcgctgtcgtaaatgcgtggatgggtgaaatcaacatctgttggatgatatggacgagagccgcaggcaataacaaatttttcagcggttagtgtttcaacgctgccgtccgggcaatccagcgccaacgtatgctcgtcaacaaagcgagcgtttccctgcaatatttcacagtgattacgttcgtaaaatccctgacgcatgcgcgtttgttgattaatcacgttatcggcatggttaaggatatcggcaaaagaagagcggagcagtcgggaatggtcgctgtaaagtgggttttgattgaattctataatgcggctgacggcgtgacggagagctttcgacgggatggtgccccagtgggtgcaaccgccgccaacattttgataacgctcgataactgcgacgcgcgcaccttgcttaaccaggcccattgcagcgccttcgccgccggggccggaacctattactatggcatcgtaatcgtaggaatgtggcatggtagggcttacctgttcttatacataaaagcaacagaatggtaacattttatcgcgggtaagccaattgatccccgtcatttatctggctatatcctgagcggcctttgctttgtctgtttcttacttttgccctgacgttttattggatttttatcgacgatactctccgtttaagcggcaggtttccgctgtacgtaaaagaaccggccaaagaattgcagtaaatatgttttattgcgttaccgttcattcacaatactggagcaatccagtatgttcattctctggtatagtgccagcagtacttttggcaaggattcagacatcgtgatgggcgtaagagcgcaacaaaaagaaaaaacccgccgttcgctggtggaagccgcatttagccaattaagtgctgaacgcagcttcgccagcctgagtttgcgtgaagtggcgcgtgaagcgggcattgctcccacctctttttatcggcatttccgcgacgtagacgaactgggtctgaccatggttgatgagagcggtttaatgctacgccaactcatgcgccaggcgcgtcagcgtatcgccaaaggcgggagtgtgatccgcacctcggtctccacatttatggagttcatcggtaataatcctaacgccttccggttattattgcgggaacgctccggcacctccgctgcgtttcgtgccgccgttgcgcgtgaaattcagcacttcattgcggaacttgcggactatctggaactcgaaaaccatatgccgcgtgcgtttactgaagcgcaagccgaagcaatggtgacaattgtcttcagtgcgggtgccgaggcgttggacgtcggcgtcgaacaacgtcggcaattagaagagcgactggtactgcaactgcgaatgatttcgaaaggggcttattactggtatcgccgtgaacaagagaaaaccgcaattattccgggaaatgtgaaggacgagtaatgaaacaagcaaatcaagatagaggtacgctgctgctggcgttagttgctggcttatcgattaatggtactttcgcagcgctgtttagctccattgtgccattttctgtattcccgattatttccctggtgctgacggtttactgcctgcatcaacgttatcttaatcgcactatgccggtaggcttgccgggtctggcagctgcctgttttattctcggcgtactgctgtacagcacggtagttcgtgcggaatatccggatatcggctctaacttcttcccggcagtactctccgtcattatggtgttctggattggcgcgaagatgcgtaaccgtaagcaggaagttgctgagtaatcggtattatgccggatgctggcgcatccggcatgggttttacttcgcggtcagtaatacgccgcactccatatggtgcgtgtaggggaactgatcaaacagagccagacgttcgaccttgtgcgtctggcttaatgtttccagattcttgcataacgtttccgggttacaggagatgtacaaaatacgcggatacgcctgcaccattttctcggtttcactgtccagaccgctgcgcggagggtcgacaaaaatggtttcgcactgataactctttaagtcgatcccttgcaggcggttaaactcgcgcacaccattcatcgcctgagtaaattcttctgccgccatacgaataatttgtacgttatcaatatggttagctgcgatgttgtattgcgcagcagcaaccgacggcttagcgatttcggtggctaatacccgatcaaaattacgcgccagcgctaatgaaaagttaccgttgccgcagtacagctccagtaaatcgccttttgagcctttggttacgtccagcgcccattccagcatctgaatattcatcgccgcgttcggctgggtaaagctgttttctacctgacggtagatcatctctttccctgcgaccggcagacgttcatcgatgtaatcctgatccagctcgattttggttttcgttgcccgaccaatcagatgcacattcagattctgcgcgcgcagtgcatcgcgcagggcctccgcttcctgacgccactcatcatccagcttcttatggtatagcagggaaaccaccgcctgattactcagtgtagtgaggtaatcaatctggaacaacttgtggcgcagaacgggattattacgcacacccgcaatcatcgccgtcatcaactggttgataagttcactggcggcggggaagctatccacgcggatgcggcttttggtttgttgatcgaaaatgatgtgatacaggtcatcgccatcgtgccagatgcggaactccgcgcgcatccggtaatgactgaccggcgagcgaaacacttccggaaccaggtcagaaaacggtgccatcatactttgcaaacgtaccactttttcggctaactgcgcttcatactgttctgttggaaggtgttcgggggtcatgatgtatcctgaaaaattaaagtacgcggcgattgtagggattgctcatcagatgtccagatcttgatgaattcctatttgtgagctacgtctggacagtaacttgttacaacctgtagcatccacttgccggtcctgtgagttaatagggaatccagtgcgaatctggagctgacgcgcagcggtaaggaaaggtgcgatgattgcgttatgcggacactgccattcggtgggaagtcatcatctcttagtatcttagatacccctccaagcccgaagacctgccggccaacgtcgcatctggttctcatcatcgcgtaatattgatgaaacctgcggcatccttcttctattgtggatgctttacaatgattaaaaaagcttcgctgctgacggcgtgttccgtcacggcattttccgcttgggcacaggataccagcccggatactctcgtcgttactgctaaccgttttgaacagccgcgcagcactgtgcttgcaccaaccaccgttgtgacccgtcaggatatcgaccgctggcagtcgacctcggtcaatgatgtgctgcgccgtcttccgggcgtcgatatcacccaaaacggcggttcaggtcagctctcatctatttttattcgcggtacaaatgccagtcatgtgttggtgttaattgatggcgtacgcctgaatctggcgggggtgagtggttctgccgaccttagccagttccctattgcgcttgtccagcgtgttgaatatatccgtgggccgcgctccgctgtttatggttccgatgcaataggcggggtggtgaatatcatcacgacgcgcgatgaacccggaacggaaatttcagcagggtggggaagcaatagttatcagaactatgatgtctctacgcagcaacaactgggggataagacacgggtaacgctgttgggcgattatgcccatactcatggttatgatgttgttgcctatggtaataccggaacgcaagcgcagacagataacgatggttttttaagtaaaacgctttatggcgcgctggagcataactttactgatgcctggagcggctttgtgcgcggctatggctatgataaccgtaccaattatgacgcgtattattctcccggttcaccgttgctcgatacccgtaaactctatagccaaagttgggacgccgggctgcgctataacggcgaactgattaaatcacaactcattaccagctatagccatagcaaagattacaactacgatccccattatggtcgttatgattcgtcggcgacgctcgatgagatgaagcaatacaccgtccagtgggcaaacaatgtcatcgttggtcacggtagtattggtgcgggtgtcgactggcagaaacagactacgacgccgggtacaggttatgttgaggatggatatgatcaacgtaataccggcatctatctgaccgggctgcaacaagtcggcgattttacctttgaaggcgcagcacgcagtgacgataactcacagtttggtcgtcatggaacctggcaaaccagcgccggttgggaattcatcgaaggttatcgcttcattgcttcctacgggacatcttataaggcaccaaatctggggcaactgtatggcttctacggaaatccgaatctggacccggagaaaagcaaacagtgggaaggcgcgtttgaaggcttaaccgctggggtgaactggcgtatttccggatatcgtaacgatgtcagtgacttgatcgattatgatgatcacaccctgaaatattacaacgaagggaaagcgcggattaagggcgtcgaggcgaccgccaattttgataccggaccactgacgcatactgtgagttatgattatgtcgatgcgcgcaatgcgattaccgacacgccgttgttacgccgtgctaaacagcaggtgaaataccagctcgactggcagttgtatgacttcgactggggtattacttatcagtatttaggcactcgctatgataaggattactcatcttatccttatcaaaccgttaaaatgggcggtgtgagcttgtgggatcttgcggttgcgtatccggtcacctctcacctgacagttcgtggtaaaatagccaacctgttcgacaaagattatgagacagtctatggctaccaaactgcaggacgggaatacaccttgtctggcagctacaccttctgaaccacgtcccaccgtgctggtgtttgactccggcgtcggtgggttgtcggtctatgacgagatccggcatctcttaccggatctccattacatttatgctttcgataacgtcgctttcccgtatggcgaaaaaagcgaagcgtttattgttgagcgagtggtggcaattgtcaccgcggtgcaagaacgttatccccttgcgctggctgtggtcgcttgcaacactgccagtaccgtttcacttcctgcattacgcgaaaagttcgacttcccggttgttggtgtcgtgccggcgattaaacctgctgcacgtctgacggcaaatggcattgtcggattactggcaacccgcggaacagttaaacgttcttatactcatgagctgatcgcgcgtttcgctaatgaatgccagatagaaatgctgggctcggcagagatggttgagttggctgaagcgaagctacatggcgaagatgtttctctggatgcactaaaacgtatcctacgcccgtggttaagaatgaaagagccgccagataccgttgtattgggttgcacccatttccctctactacaagaagaactgttacaagtgctgccagagggaacccggctggtggattctggcgcagcgattgctcgccgaacggcctggttgttagaacatgaagccccggatgcaaaatctgccgatgcgaatattgccttttgtatggcaatgacgccaggagctgaacaattattgcccgttttacagcgttacggcttcgaaacgctcgaaaaactggcagttttaggctgatttggttgaatgttgcgcggtcagaaaattattttaaatttcctcttgtcaggccggaataactccctataatgcgccaccactgacacggaacaacggcaaacacgccgccgggtcagcggggttctcctgagaactccggcagagaaagcaaaaataaatgcttgactctgtagcgggaaggcgtattatgcacaccccgcgccgctgagaaaaagcgaagcggcactgctctttaacaatttatcagacaatctgtgtgggcactcgaagatacggattcttaacgtcgcaagacgaaaaatgaataccaagtctcaagagtgaacacgtaattcattacgaagtttaattctttgagcgtcaaacttttaaattgaagagtttgatcatggctcagattgaacgctggcggcaggcctaacacatgcaagtcgaacggtaacaggaagaagcttgcttctttgctgacgagtggcggacgggtgagtaatgtctgggaaactgcctgatggagggggataactactggaaacggtagctaataccgcataacgtcgcaagaccaaagagggggaccttcgggcctcttgccatcggatgtgcccagatgggattagctagtaggtggggtaacggctcacctaggcgacgatccctagctggtctgagaggatgaccagccacactggaactgagacacggtccagactcctacgggaggcagcagtggggaatattgcacaatgggcgcaagcctgatgcagccatgccgcgtgtatgaagaaggccttcgggttgtaaagtactttcagcggggaggaagggagtaaagttaatacctttgctcattgacgttacccgcagaagaagcaccggctaactccgtgccagcagccgcggtaatacggagggtgcaagcgttaatcggaattactgggcgtaaagcgcacgcaggcggtttgttaagtcagatgtgaaatccccgggctcaacctgggaactgcatctgatactggcaagcttgagtctcgtagaggggggtagaattccaggtgtagcggtgaaatgcgtagagatctggaggaataccggtggcgaaggcggccccctggacgaagactgacgctcaggtgcgaaagcgtggggagcaaacaggattagataccctggtagtccacgccgtaaacgatgtcgacttggaggttgtgcccttgaggcgtggcttccggagctaacgcgttaagtcgaccgcctggggagtacggccgcaaggttaaaactcaaatgaattgacgggggcccgcacaagcggtggagcatgtggtttaattcgatgcaacgcgaagaaccttacctggtcttgacatccacggaagttttcagagatgagaatgtgccttcgggaaccgtgagacaggtgctgcatggctgtcgtcagctcgtgttgtgaaatgttgggttaagtcccgcaacgagcgcaacccttatcctttgttgccagcggtccggccgggaactcaaaggagactgccagtgataaactggaggaaggtggggatgacgtcaagtcatcatggcccttacgaccagggctacacacgtgctacaatggcgcatacaaagagaagcgacctcgcgagagcaagcggacctcataaagtgcgtcgtagtccggattggagtctgcaactcgactccatgaagtcggaatcgctagtaatcgtggatcagaatgccacggtgaatacgttcccgggccttgtacacaccgcccgtcacaccatgggagtgggttgcaaaagaagtaggtagcttaaccttcgggagggcgcttaccactttgtgattcatgactggggtgaagtcgtaacaaggtaaccgtaggggaacctgcggttggatcacctccttaccttaaagaagcgtactttgtagtgctcacacagattgtctgatagaaagtgaaaagcaaggcgtttacgcgttgggagtgaggctgaagagaataaggccgttcgctttctattaatgaaagctcaccctacacgaaaatatcacgcaacgcgtgataagcaattttcgtgtccccttcgtctagaggcccaggacaccgccctttcacggcggtaacaggggttcgaatcccctaggggacgccacttgctggtttgtgagtgaaagtcgccgaccttaatatctcaaaactcatcttcgggtgatgtttgagatatttgctctttaaaaatctggatcaagctgaaaattgaaacactgaacaacgagagttgttcgtgagtctctcaaattttcgcaacacgatgatgaatcgaaagaaacatcttcgggttgtgaggttaagcgactaagcgtacacggtggatgccctggcagtcagaggcgatgaaggacgtgctaatctgcgataagcgtcggtaaggtgatatgaaccgttataaccggcgatttccgaatggggaaacccagtgtgtttcgacacactatcattaactgaatccataggttaatgaggcgaaccgggggaactgaaacatctaagtaccccgaggaaaagaaatcaaccgagattcccccagtagcggcgagcgaacggggagcagcccagagcctgaatcagtgtgtgtgttagtggaagcgtctggaaaggcgcgcgatacagggtgacagccccgtacacaaaaatgcacatgctgtgagctcgatgagtagggcgggacacgtggtatcctgtctgaatatggggggaccatcctccaaggctaaatactcctgactgaccgatagtgaaccagtaccgtgagggaaaggcgaaaagaaccccggcgaggggagtgaaaaagaacctgaaaccgtgtacgtacaagcagtgggagcacgcttaggcgtgtgactgcgtaccttttgtataatgggtcagcgacttatattctgtagcaaggttaaccgaataggggagccgaagggaaaccgagtcttaactgggcgttaagttgcagggtatagacccgaaacccggtgatctagccatgggcaggttgaaggttgggtaacactaactggaggaccgaaccgactaatgttgaaaaattagcggatgacttgtggctgggggtgaaaggccaatcaaaccgggagatagctggttctccccgaaagctatttaggtagcgcctcgtgaattcatctccgggggtagagcactgtttcggcaagggggtcatcccgacttaccaacccgatgcaaactgcgaataccggagaatgttatcacgggagacacacggcgggtgctaacgtccgtcgtgaagagggaaacaacccagaccgccagctaaggtcccaaagtcatggttaagtgggaaacgatgtgggaaggcccagacagccaggatgttggcttagaagcagccatcatttaaagaaagcgtaatagctcactggtcgagtcggcctgcgcggaagatgtaacggggctaaaccatgcaccgaagctgcggcagcgacgcttatgcgttgttgggtaggggagcgttctgtaagcctgcgaaggtgtgctgtgaggcatgctggaggtatcagaagtgcgaatgctgacataagtaacgataaagcgggtgaaaagcccgctcgccggaagaccaagggttcctgtccaacgttaatcggggcagggtgagtcgacccctaaggcgaggccgaaaggcgtagtcgatgggaaacaggttaatattcctgtacttggtgttactgcgaaggggggacggagaaggctatgttggccgggcgacggttgtcccggtttaagcgtgtaggctggttttccaggcaaatccggaaaatcaaggctgaggcgtgatgacgaggcactacggtgctgaagcaacaaatgccctgcttccaggaaaagcctctaagcatcaggtaacatcaaatcgtaccccaaaccgacacaggtggtcaggtagagaataccaaggcgcttgagagaactcgggtgaaggaactaggcaaaatggtgccgtaacttcgggagaaggcacgctgatatgtaggtgaggtccctcgcggatggagctgaaatcagtcgaagataccagctggctgcaactgtttattaaaaacacagcactgtgcaaacacgaaagtggacgtatacggtgtgacgcctgcccggtgccggaaggttaattgatggggttagcgcaagcgaagctcttgatcgaagccccggtaaacggcggccgtaactataacggtcctaaggtagcgaaattccttgtcgggtaagttccgacctgcacgaatggcgtaatgatggccaggctgtctccacccgagactcagtgaaattgaactcgctgtgaagatgcagtgtacccgcggcaagacggaaagaccccgtgaacctttactatagcttgacactgaacattgagccttgatgtgtaggataggtgggaggctttgaagtgtggacgccagtctgcatggagccgaccttgaaataccaccctttaatgtttgatgttctaacgttgacccgtaatccgggttgcggacagtgtctggtgggtagtttgactggggcggtctcctcctaaagagtaacggaggagcacgaaggttggctaatcctggtcggacatcaggaggttagtgcaatggcataagccagcttgactgcgagcgtgacggcgcgagcaggtgcgaaagcaggtcatagtgatccggtggttctgaatggaagggccatcgctcaacggataaaaggtactccggggataacaggctgataccgcccaagagttcatatcgacggcggtgtttggcacctcgatgtcggctcatcacatcctggggctgaagtaggtcccaagggtatggctgttcgccatttaaagtggtacgcgagctgggtttagaacgtcgtgagacagttcggtccctatctgccgtgggcgctggagaactgaggggggctgctcctagtacgagaggaccggagtggacgcatcactggtgttcgggttgtcatgccaatggcactgcccggtagctaaatgcggaagagataagtgctgaaagcatctaagcacgaaacttgccccgagatgagttctccctgaccctttaagggtcctgaaggaacgttgaagacgacgacgttgataggccgggtgtgtaagcgcagcgatgcgttgagctaaccggtactaatgaaccgtgaggcttaaccttacaacgccgaagctgttttggcggatgagagaagattttcagcctgatacagattaaatcagaacgcagaagcggtctgataaaacagaatttgcctggcggcagtagcgcggtggtcccacctgaccccatgccgaactcagaagtgaaacgccgtagcgccgatggtagtgtggggtctccccatgcgagagtagggaactgccaggcatcaaataaaacgaaaggctcagtcgaaagactgggcctttcgttttatctgttgtttgtcggtgaacgctctcctgagtaggacaaatccgccgggagcggatttgaacgttgcgaagcaacggcccggagggtggcgggcaggacgcccgccataaactgccaggcatcaaattaagcagaaggccatcctgacggatggcctttttgcgtttctacaaactcttcctgtcgtcatatctacaagccatccccccacagatacggtaaactagcctcgtttttgcatcaggaaagcagctatgaaccactccttaaaaccctggaacacatttggcattgatcataatgctcagcacattgtatgtgccgaagacgaacaacaattactcaatgcctggcagtatgcaaccgcagaaggacaacccgttcttattctgggtgaaggaagtaatgtactttttctggaggactatcgcggcacggtgatcatcaaccggatcaaaggtatcgaaattcatgatgaacctgatgcgtggtatttacatgtaggagccggagaaaactggcatcgtctggtaaaatacactttgcaggaaggtatgcctggtctggaaaatctggcattaattcctggttgtgtcggctcatcacctatccagaatattggtgcttatggcgtagaattacagcgagtttgcgcttatgttgattctgttgaactggcgacaggcaagcaagtgcgcttaactgccaaagagtgccgttttggctatcgcgacagtatttttaaacatgaataccaggaccgcttcgctattgtagccgtaggtctgcgtctgccaaaagagtggcaacctgtactaacgtatggtgacttaactcgtctggatcctacaacagtaacgccacagcaagtatttaatgcggtgtgtcatatgcgcaccaccaaactccctgatccaaaagtgaatggcaatgccggtagtttcttcaaaaaccctgttgtatctgccgaaacggctaaagcattactgtcacaatttccaacagcaccaaattacccccaggcggatggttcagtaaaactggcagcaggttggcttatcgatcagtgccagctaaaagggatgcaaataggtggggctgcggtgcaccgtcaacaggcgttagttctcattaatgaagacaatgcaaaaagcgaagatgttgtacagctggcgcatcatgtaagacagaaagttggtgaaaaatttaatgtctggcttgagcctgaagtccgctttattggtgcatcaggtgaagtgagcgcagtggagacaatttcatgaaggataacaccgtgccactgaaattgattgccctgttagcgaacggtgaatttcactctggcgagcagttgggtgaaacgctgggaatgagccgggcggctattaataaacacattcagacactgcgtgactggggcgttgatgtctttaccgttccgggtaaaggatacagcctgcctgagcctatccagttacttaatgctaaacagatattgggtcagctggatggcggtagtgtagccgtgctgccagtgattgactccacgaatcagtaccttcttgatcgtatcggagagcttaaatcgggcgatgcttgcattgcagaataccagcaggctggccgtggtcgccggggtcggaaatggttttcgccttttggcgcaaacttatatttgtcgatgttctggcgtctggaacaaggcccggcggcggcgattggtttaagtctggttatcggtatcgtgatggcggaagtattacgcaagctgggtgcagataaagttcgtgttaaatggcctaatgacctctatctgcaggatcgcaagctggcaggcattctggtggagctgactggcaaaactggcgatgcggcgcaaatagtcattggagccgggatcaacatggcaatgcgccgtgttgaagagagtgtcgttaatcaggggtggatcacgctgcaggaagcggggatcaatctcgatcgtaatacgttggcggccatgctaatacgtgaattacgtgctgcgttggaactcttcgaacaagaaggattggcaccttatctgtcgcgctgggaaaagctggataattttattaatcgcccagtgaaacttatcattggtgataaagaaatatttggcatttcacgcggaatagacaaacagggggctttattacttgagcaggatggaataataaaaccctggatgggcggtgaaatatccctgcgtagtgcagaaaaataagaaaggggagtattcgctcccctgcaaattatttgcgtagtctgacctcttctaccgcatgattagcacttttcgtcaggattaaactggcgcgctcacgagtaggtagaatattttgctttaagttcagccagttgatctctttccacaatgtcatggcagtcttaatcgcttcttctttagttaatttcgcgtagttatgaaaataggaatccgggtcggtaaaagccccttcgcggaatttcagaaaacggttgatataccatgtctgaagtaagtcttccggtgcatcaacatatatcgaaaaatcgacaaaatcagaaacaaatacatgatgtggatcgtgtggataatccatcccgctctgtaagacatttaacccttcaagaattaaaatatcaggctgaacaaccgttttatctccatccgggatcacatcataaataagatgtgagtaaacaggtgctgtaacgtttggcacgccggatttgagatcggaaacaaacttcaccaggcgatgcatatcatacgattccgggaagcctttcttcttcatcagaccacgttctttcagaacctgattagggtgaaggaagccatctgtagtgatcagttcaacacgacgatgttccggccaacggcttaatagcgcctgcaatacacgggcggttgtacttttccccaccgcgacactgccagcaatactgataatgtaaggaatgcgttgcccgttggtaccaagaaactgttccagaactgcctgacggcgcagattcgagcttatatagaagttcagcaaacgtgacaaaggtaaatagatctcggcaacttcttctaacgagagatcttcattaatacctttgagacgggcgatctcatcttccgataacgtcataggtacggaatcacgcagagctgcccactggttgcggtcaaactgtaggtaaggcgtcattaacgtttgctcttttatactcataagcatgtttctggcggtcatagctctatcggcaaagcgatatttgccatggcgcgtcacagttctgttgaatgggttaatgggcaggagggtaacaccagatggggaggaataataagaaaaaatctctgccaggaagctatcgttgaaaagcaatgtgacagatattccatctgataaaaagaattatggtttagcaggagcgcattgttgagcacaatgatgttgaaaaagtgtgctaatctgccctccgttcggctgtttcttcatcgtgtcgcataaaatgtgaccaataaaacaaattatgcaattttttagttgcatgaactcgcatgtctccatagaatgcgcgctacttgatgccgacttagctcagtaggtagagcaactgacttgtaatcagtaggtcaccagttcgattccggtagtcggcaccatcaagtccggtggggttcccgagcggccaaagggagcagactgtaaatctgccgtcacagacttcgaaggttcgaatccttcccccaccaccaatttcggccacgcgatggcgtagcccgagacgataagttcgcttaccggctcgaataaagagagcttctctcgatattcagtgcagaatgaaaatcaggtagccgagttccaggatgcgggcatcgtataatggctattacctcagccttccaagctgatgatgcgggttcgattcccgctgcccgctccaagatgtgctgatatagctcagttggtagagcgcacccttggtaagggtgaggtcggcagttcgaatctgcctatcagcaccacttcttttctcctccctgttttttccttctgtttattgcattcaacaagtcgggcatgttgcctggttgatgtggtgatatcaccgatttatccgtgtcttagagggacaatcgatgtctaaagaaaagtttgaacgtacaaaaccgcacgttaacgtcggtactatcggccacgttgaccatggtaaaacaacgctgaccgctgcaatcactaccgtactggctaaaacctacggcggtgctgctcgcgcattcgaccagatcgataacgcgccggaagaaaaagctcgtggtatcaccatcaacacttctcacgttgaatacgacaccccgacccgtcactacgcacacgtagactgcccggggcacgccgactatgttaaaaacatgatcaccggtgctgcgcagatggacggcgcgatcctggtagttgctgcgactgacggcccgatgccgcagactcgtgagcacatcctgctgggtcgtcaggtaggcgttccgtacatcatcgtgttcctgaacaaatgcgacatggttgatgacgaagagctgctggaactggttgaaatggaagttcgtgaacttctgtctcagtacgacttcccgggcgacgacactccgatcgttcgtggttctgctctgaaagcgctggaaggcgacgcagagtgggaagcgaaaatcctggaactggctggcttcctggattcttacattccggaaccagagcgtgcgattgacaagccgttcctgctgccgatcgaagacgtattctccatctccggtcgtggtaccgttgttaccggtcgtgtagaacgcggtatcatcaaagttggtgaagaagttgaaatcgttggtatcaaagagactcagaagtctacctgtactggcgttgaaatgttccgcaaactgctggacgaaggccgtgctggtgagaacgtaggtgttctgctgcgtggtatcaaacgtgaagaaatcgaacgtggtcaggtactggctaagccgggcaccatcaagccgcacaccaagttcgaatctgaagtgtacattctgtccaaagatgaaggcggccgtcatactccgttcttcaaaggctaccgtccgcagttctacttccgtactactgacgtgactggtaccatcgaactgccggaaggcgtagagatggtaatgccgggcgacaacatcaaaatggttgttaccctgatccacccgatcgcgatggacgacggtctgcgtttcgcaatccgtgaaggcggccgtaccgttggcgcgggcgttgtagcaaaagttctgagctaattgccgataacatttgacgcaatgcgcactaaaagggcatcatttgatgccctttttgcacgctttcgtaccagaacctggctcatcagtgattttctttgtcataatcattgctgagacaggctctgttgagggcgtataatccgaaaagctaatacgcgtttcgatttggtttgcctcgcgatcgcggggtgaaaatgtttgtagaaaacttctgacaggttggtttatgagtgcgaataccgaagctcaaggaagcgggcgcggcctggaagcgatgaagtgggtcgttgtggtggcattgctcctggtggcgattgtcggcaactatctttatcgcgacattatgctgccgctgcgtgcgctggccgtagtaattctgattgctgcagcgggtggtgtcgcgctgttaacgacaaaaggtaaagctaccgttgcttttgcccgtgaagcgcgtaccgaagtccgtaaggtcatttggccgactcgccaggaaacattgcacaccacgctgattgtggctgcggttaccgcagtaatgtcactgatcctgtggggactggatggtattctggttcgcctggtatcctttatcactggcctgaggttctgagatgtctgaagctcctaaaaagcgctggtacgtcgttcaggcgttttccggttttgaaggccgcgtagcaacgtcgctgcgtgagcatatcaaattacacaacatggaagatttgtttggtgaagtcatggtaccaaccgaagaagtggttgaaatccgtggcggtcagcgtcgcaaaagcgaacgtaaattcttccctggctacgtcctcgttcagatggtgatgaacgacgcgagctggcacctggtgcgcagcgtaccgcgtgtgatgggcttcatcggcggtacttccgatcgtcctgcgccaatcagcgataaagaagtcgatgcgattatgaaccgcctgcagcaggttggtgataagccgcgtccgaaaacgctgtttgaaccgggtgaaatggtccgtgttaatgatggtccgttcgctgacttcaacggtgttgttgaagaagtggattacgagaaatctcgtctgaaagtgtctgtttctatcttcggtcgtgcgaccccggtagagctggacttcagccaggttgaaaaagcctaacccagcgatcaaaaaagcggcgatttaatcgttgcacaaggcgtgagattggaatacaatttcgcgccttttgtttttatggccttgcccgtaaaacgattttttatatcacggggagcctctcagaggcgttattacccaacttgaggaatttataatggctaagaaagtacaagcctatgtcaagctgcaggttgcagctggtatggctaacccgagtccgccagtaggtccggctctgggtcagcagggcgtaaacatcatggaattctgcaaagcgttcaacgcaaaaactgattccatcgaaaaaggtctgccgattccggtagtaatcaccgtttacgctgaccgttctttcactttcgttaccaagaccccgccggcagcagttctgctgaaaaaagcggctggtatcaagtctggttccggtaagccgaacaaagacaaagtgggtaaaatttcccgcgctcagctgcaggaaatcgcgcagaccaaagctgccgacatgactggtgccgacattgaagcgatgactcgctccatcgaaggtactgcacgttccatgggcctggtagtggaggactaagaaatggctaaactgaccaagcgcatgcgtgttatccgcgagaaagttgatgcaaccaaacagtacgacatcaacgaagctatcgcactgctgaaagagctggcgactgctaaattcgtagaaagcgtggacgtagctgttaacctcggcatcgacgctcgtaaatctgaccagaacgtacgtggtgcaactgtactgccgcacggtactggccgttccgttcgcgtagccgtatttacccaaggtgcaaacgctgaagctgctaaagctgcaggcgcagaactggtaggtatggaagatctggctgaccagatcaagaaaggcgaaatgaactttgacgttgttattgcttctccggatgcaatgcgcgttgttggccagctgggccaggttctgggtccgcgcggcctgatgccaaacccgaaagtgggtactgtaacaccgaacgttgctgaagcggttaaaaacgctaaagctggccaggttcgttaccgtaacgacaaaaacggcatcatccacaccaccatcggtaaagtggactttgacgctgacaaactgaaagaaaacctggaagctctgctggttgcgctgaaaaaagcaaaaccgactcaggcgaaaggcgtgtacatcaagaaagttagcatctccaccaccatgggtgcaggtgttgcagttgaccaggctggcctgagcgcttctgtaaactaatgcctttacgtgggcggtgattttgtctacaatcttacccccacgtataatgcttaatgcagacgtatatccgagatattcgggttgtggcaaggcggcaactgagtgagtcgccaggagcatagctaactatgtgactggtgcgaatgaaggaagccaacgccgtcacaagctgaatagcgacggatagaaaagatttgttcgttggagcctggcctatccaggcctccgtcgaagaccgcaggagtttcgcaagaaacttaatcccctgcgtagacggtgacagaacgctaagattattcttttatattctggcttgtttctgctcaccgtaattaagacgctctctccgtttggaggagtgaagtgagttccagagattttctctggcaaacatccaggagcaaagctaatggctttaaatcttcaagacaaacaagcgattgttgctgaagtcagcgaagtagccaaaggcgcgctgtctgcagtagttgcggattcccgtggcgtaactgtagataaaatgactgaactgcgtaaagcaggtcgcgaagctggcgtatacatgcgtgttgttcgtaacaccctgctgcgccgtgctgttgaaggtactccgttcgagtgcctgaaagacgcgtttgttggtccgaccctgattgcatactctatggaacacccgggcgctgctgctcgtctgttcaaagagttcgcgaaagcgaatgcaaaatttgaggtcaaagccgctgcctttgaaggtgagctgatcccggcgtctcagatcgaccgcctggcaactctgccgacctacgaagaagcaattgcacgcctgatggcaaccatgaaagaagcttcggctggcaaactggttcgtactctggctgctgtacgcgatgcgaaagaagctgcttaatcgcagttatctttttaacgcattcgcttacgtataaacttattctgatattcaggaacaatttaaatgtctatcactaaagatcaaatcattgaagcagttgcagctatgtctgtaatggacgttgtagaactgatctctgcaatggaagaaaaattcggtgtttccgctgctgctgctgtagctgtagctgctggcccggttgaagctgctgaagaaaaaactgaattcgacgtaattctgaaagctgctggcgctaacaaagttgctgttatcaaagcagtacgtggcgcaactggcctgggtctgaaagaagctaaagacctggtagaatctgcaccggctgctctgaaagaaggcgtgagcaaagacgacgcagaagcactgaaaaaagctctggaagaagctggcgctgaagttgaagttaaataagccaacccttccggttgcagcctgagaaatcaggctgatggctggtgactttttagtcaccagcctttttgcgctgtaaggcgccagtagcgtttcacactgtttgactactgctgtgcctttcaatgcttgtttctatcgacgacttaatatactgcgacaggacgtccgttctgtgtaaatcgcaatgaaatggtttaagcgtgatagcaacaggcattgcggaaagtgttccattttccggtcaacaaaatagtgttgcacaaactgtccgctcaatggacagatgggtcgacttgtcagcgagctgaggaaccctatggtttactcctataccgagaaaaaacgtattcgtaaggattttggtaaacgtccacaagttctggatgtaccttatctcctttctatccagcttgactcgtttcagaaatttatcgagcaagatcctgaagggcagtatggtctggaagctgctttccgttccgtattcccgattcagagctacagcggtaattccgagctgcaatacgtcagctaccgccttggcgaaccggtgtttgacgtccaggaatgtcaaatccgtggcgtgacctattccgcaccgctgcgcgttaaactgcgtctggtgatctatgagcgcgaagcgccggaaggcaccgtaaaagacattaaagaacaagaagtctacatgggcgaaattccgctcatgacagacaacggtacctttgttatcaacggtactgagcgtgttatcgtttcccagctgcaccgtagtccgggcgtcttctttgactccgacaaaggtaaaacccactcttcgggtaaagtgctgtataacgcgcgtatcatcccttaccgtggttcctggctggacttcgaattcgatccgaaggacaacctgttcgtacgtatcgaccgtcgccgtaaactgcctgcgaccatcattctgcgcgccctgaactacaccacagagcagatcctcgacctgttctttgaaaaagttatctttgaaatccgtgataacaagctgcagatggaactggtgccggaacgcctgcgtggtgaaaccgcatcttttgacatcgaagctaacggtaaagtgtacgtagaaaaaggccgccgtatcactgcgcgccacattcgccagctggaaaaagacgacgtcaaactgatcgaagtcccggttgagtacatcgcaggtaaagtggttgctaaagactatattgatgagtctaccggcgagctgatctgcgcagcgaacatggagctgagcctggatctgctggctaagctgagccagtctggtcacaagcgtatcgaaacgctgttcaccaacgatctggatcacggcccatatatctctgaaaccttacgtgtcgacccaactaacgaccgtctgagcgcactggtagaaatctaccgcatgatgcgccctggcgagccgccgactcgtgaagcagctgaaagcctgttcgagaacctgttcttctccgaagaccgttatgacttgtctgcggttggtcgtatgaagttcaaccgttctctgctgcgcgaagaaatcgaaggttccggtatcctgagcaaagacgacatcattgatgttatgaaaaagctcatcgatatccgtaacggtaaaggcgaagtcgatgatatcgaccacctcggcaaccgtcgtatccgttccgttggcgaaatggcggaaaaccagttccgcgttggcctggtacgtgtagagcgtgcggtgaaagagcgtctgtctctgggcgatctggataccctgatgccacaggatatgatcaacgccaagccgatttccgcagcagtgaaagagttcttcggttccagccagctgtctcagtttatggaccagaacaacccgctgtctgagattacgcacaaacgtcgtatctccgcactcggcccaggcggtctgacccgtgaacgtgcaggcttcgaagttcgagacgtacacccgactcactacggtcgcgtatgtccaatcgaaacccctgaaggtccgaacatcggtctgatcaactctctgtccgtgtacgcacagactaacgaatacggcttccttgagactccgtatcgtaaagtgaccgacggtgttgtaactgacgaaattcactacctgtctgctatcgaagaaggcaactacgttatcgcccaggcgaactccaacttggatgaagaaggccacttcgtagaagacctggtaacttgccgtagcaaaggcgaatccagcttgttcagccgcgaccaggttgactacatggacgtatccacccagcaggtggtatccgtcggtgcgtccctgatcccgttcctggaacacgatgacgccaaccgtgcattgatgggtgcgaacatgcaacgtcaggccgttccgactctgcgcgctgataagccgctggttggtactggtatggaacgtgctgttgccgttgactccggtgtaactgcggtagctaaacgtggtggtgtcgttcagtacgtggatgcttcccgtatcgttatcaaagttaacgaagacgagatgtatccgggtgaagcaggtatcgacatctacaacctgaccaaatacacccgttctaaccagaacacctgtatcaaccagatgccgtgtgtgtctctgggtgaaccggttgaacgtggcgacgtgctggcagacggtccgtccaccgacctcggtgaactggcgcttggtcagaacatgcgcgtagcgttcatgccgtggaatggttacaacttcgaagactccatcctcgtatccgagcgtgttgttcaggaagaccgtttcaccaccatccacattcaggaactggcgtgtgtgtcccgtgacaccaagctgggtccggaagagatcaccgctgacatcccgaacgtgggtgaagctgcgctctccaaactggatgaatccggtatcgtttacattggtgcggaagtgaccggtggcgacattctggttggtaaggtaacgccgaaaggtgaaactcagctgaccccagaagaaaaactgctgcgtgcgatcttcggtgagaaagcctctgacgttaaagactcttctctgcgcgtaccaaacggtgtatccggtacggttatcgacgttcaggtctttactcgcgatggcgtagaaaaagacaaacgtgcgctggaaatcgaagaaatgcagctcaaacaggcgaagaaagacctgtctgaagaactgcagatcctcgaagcgggtctgttcagccgtatccgtgctgtgctggtagccggtggcgttgaagctgagaagctcgacaaactgccgcgcgatcgctggctggagctgggcctgacagacgaagagaaacaaaatcagctggaacagctggctgagcagtatgacgaactgaaacacgagttcgagaagaaactcgaagcgaaacgccgcaaaatcacccagggcgacgatctggcaccgggcgtgctgaagattgttaaggtatatctggcggttaaacgccgtatccagcctggtgacaagatggcaggtcgtcacggtaacaagggtgtaatttctaagatcaacccgatcgaagatatgccttacgatgaaaacggtacgccggtagacatcgtactgaacccgctgggcgtaccgtctcgtatgaacatcggtcagatcctcgaaacccacctgggtatggctgcgaaaggtatcggcgacaagatcaacgccatgctgaaacagcagcaagaagtcgcgaaactgcgcgaattcatccagcgtgcgtacgatctgggcgctgacgttcgtcagaaagttgacctgagtaccttcagcgatgaagaagttatgcgtctggctgaaaacctgcgcaaaggtatgccaatcgcaacgccggtgttcgacggtgcgaaagaagcagaaattaaagagctgctgaaacttggcgacctgccgacttccggtcagatccgcctgtacgatggtcgcactggtgaacagttcgagcgtccggtaaccgttggttacatgtacatgctgaaactgaaccacctggtcgacgacaagatgcacgcgcgttccaccggttcttacagcctggttactcagcagccgctgggtggtaaggcacagttcggtggtcagcgtttcggggagatggaagtgtgggcgctggaagcatacggcgcagcatacaccctgcaggaaatgctcaccgttaagtctgatgacgtgaacggtcgtaccaagatgtataaaaacatcgtggacggcaaccatcagatggagccgggcatgccagaatccttcaacgtattgttgaaagagattcgttcgctgggtatcaacatcgaactggaagacgagtaattctcgctcaaacaggtcactgctgtcgggttaaaacccggcagcggattgtgctaactccgacgggagcaaatccgtgaaagatttattaaagtttctgaaagcgcagactaaaaccgaagagtttgatgcgatcaaaattgctctggcttcgccagacatgatccgttcatggtctttcggtgaagttaaaaagccggaaaccatcaactaccgtacgttcaaaccagaacgtgacggccttttctgcgcccgtatctttgggccggtaaaagattacgagtgcctgtgcggtaagtacaagcgcctgaaacaccgtggcgtcatctgtgagaagtgcggcgttgaagtgacccagactaaagtacgccgtgagcgtatgggccacatcgaactggcttccccgactgcgcacatctggttcctgaaatcgctgccgtcccgtatcggtctgctgctcgatatgccgctgcgcgatatcgaacgcgtactgtactttgaatcctatgtggttatcgaaggcggtatgaccaacctggaacgtcagcagatcctgactgaagagcagtatctggacgcgctggaagagttcggtgacgaattcgacgcgaagatgggggcggaagcaatccaggctctgctgaagagcatggatctggagcaagagtgcgaacagctgcgtgaagagctgaacgaaaccaactccgaaaccaagcgtaaaaagctgaccaagcgtatcaaactgctggaagcgttcgttcagtctggtaacaaaccagagtggatgatcctgaccgttctgccggtactgccgccagatctgcgtccgctggttccgctggatggtggtcgtttcgcgacttctgacctgaacgatctgtatcgtcgcgtcattaaccgtaacaaccgtctgaaacgtctgctggatctggctgcgccggacatcatcgtacgtaacgaaaaacgtatgctgcaggaagcggtagacgccctgctggataacggtcgtcgcggtcgtgcgatcaccggttctaacaagcgtcctctgaaatctttggccgacatgatcaaaggtaaacagggtcgtttccgtcagaacctgctcggtaagcgtgttgactactccggtcgttctgtaatcaccgtaggtccatacctgcgtctgcatcagtgcggtctgccgaagaaaatggcactggagctgttcaaaccgttcatctacggcaagctggaactgcgtggtcttgctaccaccattaaagctgcgaagaaaatggttgagcgcgaagaagctgtcgtttgggatatcctggacgaagttatccgcgaacacccggtactgctgaaccgtgcaccgactctgcaccgtctgggtatccaggcatttgaaccggtactgatcgaaggtaaagctatccagctgcacccgctggtttgtgcggcatataacgccgacttcgatggtgaccagatggctgttcacgtaccgctgacgctggaagcccagctggaagcgcgtgcgctgatgatgtctaccaacaacatcctgtccccggcgaacggcgaaccaatcatcgttccgtctcaggacgttgtactgggtctgtactacatgacccgtgactgtgttaacgccaaaggcgaaggcatggtgctgactggcccgaaagaagcagaacgtctgtatcgctctggtctggcttctctgcatgcgcgcgttaaagtgcgtatcaccgagtatgaaaaagatgctaacggtgaattagtagcgaaaaccagcctgaaagacacgactgttggccgtgccattctgtggatgattgtaccgaaaggtctgccttactccatcgtcaaccaggcgctgggtaaaaaagcaatctccaaaatgctgaacacctgctaccgcattctcggtctgaaaccgaccgttatttttgcggaccagatcatgtacaccggcttcgcctatgcagcgcgttctggtgcatctgttggtatcgatgacatggtcatcccggagaagaaacacgaaatcatctccgaggcagaagcagaagttgctgaaattcaggagcagttccagtctggtctggtaactgcgggcgaacgctacaacaaagttatcgatatctgggctgcggcgaacgatcgtgtatccaaagcgatgatggataacctgcaaactgaaaccgtgattaaccgtgacggtcaggaagagaagcaggtttccttcaacagcatctacatgatggccgactccggtgcgcgtggttctgcggcacagattcgtcagcttgctggtatgcgtggtctgatggcgaagccggatggctccatcatcgaaacgccaatcaccgcgaacttccgtgaaggtctgaacgtactccagtacttcatctccacccacggtgctcgtaaaggtctggcggataccgcactgaaaactgcgaactccggttacctgactcgtcgtctggttgacgtggcgcaggacctggtggttaccgaagacgattgtggtacccatgaaggtatcatgatgactccggttatcgagggtggtgacgttaaagagccgctgcgcgatcgcgtactgggtcgtgtaactgctgaagacgttctgaagccgggtactgctgatatcctcgttccgcgcaacacgctgctgcacgaacagtggtgtgacctgctggaagagaactctgtcgacgcggttaaagtacgttctgttgtatcttgtgacaccgactttggtgtatgtgcgcactgctacggtcgtgacctggcgcgtggccacatcatcaacaagggtgaagcaatcggtgttatcgcggcacagtccatcggtgaaccgggtacacagctgaccatgcgtacgttccacatcggtggtgcggcatctcgtgcggctgctgaatccagcatccaagtgaaaaacaaaggtagcatcaagctcagcaacgtgaagtcggttgtgaactccagcggtaaactggttatcacttcccgtaatactgaactgaaactgatcgacgaattcggtcgtactaaagaaagctacaaagtaccttacggtgcggtactggcgaaaggcgatggcgaacaggttgctggcggcgaaaccgttgcaaactgggacccgcacaccatgccggttatcaccgaagtaagcggttttgtacgctttactgacatgatcgacggccagaccattacgcgtcagaccgacgaactgaccggtctgtcttcgctggtggttctggattccgcagaacgtaccgcaggtggtaaagatctgcgtccggcactgaaaatcgttgatgctcagggtaacgacgttctgatcccaggtaccgatatgccagcgcagtacttcctgccgggtaaagcgattgttcagctggaagatggcgtacagatcagctctggtgacaccctggcgcgtattccgcaggaatccggcggtaccaaggacatcaccggtggtctgccgcgcgttgcggacctgttcgaagcacgtcgtccgaaagagccggcaatcctggctgaaatcagcggtatcgtttccttcggtaaagaaaccaaaggtaaacgtcgtctggttatcaccccggtagacggtagcgatccgtacgaagagatgattccgaaatggcgtcagctcaacgtgttcgaaggtgaacgtgtagaacgtggtgacgtaatttccgacggtccggaagcgccgcacgacattctgcgtctgcgtggtgttcatgctgttactcgttacatcgttaacgaagtacaggacgtataccgtctgcagggcgttaagattaacgataaacacatcgaagttatcgttcgtcagatgctgcgtaaagctaccatcgttaacgcgggtagctccgacttcctggaaggcgaacaggttgaatactctcgcgtcaagatcgcaaaccgcgaactggaagcgaacggcaaagtgggtgcaacttactcccgcgatctgctgggtatcaccaaagcgtctctggcaaccgagtccttcatctccgcggcatcgttccaggagaccactcgcgtgctgaccgaagcagccgttgcgggcaaacgcgacgaactgcgcggcctgaaagagaacgttatcgtgggtcgtctgatcccggcaggtaccggttacgcgtaccaccaggatcgtatgcgtcgccgtgctgcgggtgaagctccggctgcaccgcaggtgactgcagaagacgcatctgccagcctggcagaactgctgaacgcaggtctgggcggttctgataacgagtaatcgttaatccgcaaataacgtaaaaacccgcttcggcgggtttttttatggggggagtttagggaaagagcatttgtcagaatatttaaggaatttctgaatactcataatcaatgtagagatgactaatatcctgaaactgactgaactaattgagtcaaactcggcaaggattcgatactattcctgtgtaactttcttaaggaacgagaatgaaacaggaagtggaaaagtggcgaccttttggacatccggatggtgatattcgtgatttatcatttcttgatgctcatcaggctgtctacgttcagcatcatgagggcaaagagcctttagagtatcgcttttgggttacctactctcttcactgcttcacaaaagattatgaacatcagacgaacgaagaaaaacaatcgttaatgtaccacgcgcctaaagaatctcgtcccttctgccagcaccgttataacttagcgcgcacacacttaaaaagaactattttggcgctgccagaaagcaacgttattcatgccgggtatggtagctatgccgtgattgaggtggacttagacggaggagataaggcattttactttgttgcgttcagggctttcagggaaaagaaaaaactccgtttgcatgtaactagcgcttatcccatttctgaaaaacagaaaggtaaatcagtgaaatttttcaccattgcctacaacttattgagaaataagcagcttcctcagccctcaaaataacaaaacccaccttaaggtgggtttcgccagagaattatctctggtattcagaacgccattaccggactttgccttgaccttgcgataatcgcaggttgcgggatgtctgaatttcttcagtctgctgcatcctggaagatgagaacatgtgttcttattttcgtctctatcatagttgagtatttactctcttacaatcagatctctttcattgctcaacaggcgatggcttcagactttgcattacggaatttttaagaaaggcagggcgaaacgaggaagaagcttttcgccctggacaacattcctgctgacggcactaccataaaaaaacacaacgctttcaacaaccttgcgtttttcatcttccgtagcggctcggaataaatttacgttcttacattccgtctcatagtctttgcgaggcgcgtcccagatagctgtcccagtctttccataccggctgcaaaccctgagcggttaacgcggcagcaaccgcttccggtctgcgatcgtcgtgcggtgagaactgttccaactcggggtgattatcggcatagccacctggctgcgttttcgagaaggcgctgacgttattgatcgccagcggaataacgcgatcgcgaaaccacggtgattcccgcgtggagagtgacagttcaatctccggtgcaagcagtcggaaggcgcagatggtttgcactaactggcgttcatccataatcgacgcaggctcaatgccgccagtacacgggcgcaggcgcggaaaggagacagagtaacggctttgccagtaatgctgttgcagccatagcaaatgttcggcaaccatatagctgtcaacgcgccagttgtcggaaaggccaattagcgcgccgaggcctatcttatcaatccccgcacgccccagccgatccggcgtttccagccgccagaagaagtcctgttttttgcctttcagatgatggcgggcataagtcgcctcgtgatatgtctcctgataaaccatcacgccatccagaccaagttgctttaactcggcgtattccgtctccgccagcggttgcacttccatctgtagtgaagagaactgttcacgaagggcagggagatgacgacgaaagtaatccatccccactttcgcctgatgttcaccagtgactaacagcagatgttcaaagcccatctcccgtatagcggcactttccctggcaatatccgcttcatccagcgttttgcgcttgatgcgattactcatggaaaatccacagtacgtgcagtcgttagcgcaaagattggaaagataaagcgggacgtagaaactaactgtgttgccaaatcgctgacgggtcagacgctgcgcccgttgggccagttgttccagatagccactggcggcaggcgataacagcgccatcatgtcgtcgcgggtgagttgcgaggcatttagcgcccgctctacgtcagcagccgttttgccgttgatacgcaggcggatgtcgtcccagtccagttgtcgccagcgatcgctgaaggttttcatgccgatgcctccagaaatccggtcagcgggctggtggcatgagcaaaataactgcggctgcccggtccggactgacgtgccagtaggcctgcttctaccgccagacgaaatgccttcgccatgttgacgggatcgtccgcgacggcaatcgccgtattcactaacaccgcgtcggcccccatttccagcgcctgcgcggcatggctgggaacgccgatgccagcatcgacaaccaccggcactgtggcctgctggataataatctccagcatggcgcgggtttccagtccctgattcgagccaatcggcgcgccgagcggcatcaccgctgcacagccgacttcttccagacgtttacacaataccggatcggccccgcagtaaggcagcacgacaaatccctgttgtaccagcgtttcggcggctttcagggtttcgatgggatcgggcaacagccagcgggcgtcagggtgaatctctaattttaaccagtttgtgcctaacgcttcacgagccagatgggcggcgaaaatggcttcttccgctgttttcgccccggatgtatttggcagcagggtcacacccgccgcgataagcggttcgaggatagcgtcgttgtgctggcgcaagtcgacacgtttcatcgccagtgtcaccagctggctgccggaagcgcggatcgcctccaccatcagttgtgaagaagcgaatttccctgtgccggtaaacagatgtgaatcaaacgttttgtccgcaatacgtaacatttcaaccccctgcaataacctgaaaaagcaggatctggtcgccatcctgcacgatatgttgcgcccactgctcacgcgggacgatttgctgattaatcgccagagccgcgcccgcttgtcgttggtcgagttgctccagtagttcgtgaacagtttgcccggcggcgcactgcatcgcttgatcgttaaacaggatctgcattgcttcctccgcataccgggcaaccactggcgcggcgcaacgccaggctgcgccactggctcgatttaccgtcgaacagtcggagttctcccgcaggtgtctctataccgcttaataacttaatggcttccagtgcctgcaaagtgcccataaccccgaccaccgggccaaccacgcccgccgtgcggcagttgcgttctggctcctggttatctggccacaggcagcggtaacacccctgctcccagggcggcgtcagtaccatcaactgaccgccaaatccgaccgcgctggcggtgataagcggcgtgttgagtgccacgcaggcggcattaatctcctggcgagtcgccatattgtcggtacagtcgagcaccacatcggcccgtgcaaccgcatcttttaacgcctcacccgttaaccgttgttgtaatgctgtcagttgaatgtcgggattcaactgtgtcagtcgctgttggctgacctgcgatttcgggcgatcgatatcttcagtggtaaagaggatttgtcgttgcagattgcttaaatgcacatcgtcgtcatctgccagtaccagcgtcccgacgccagcgcccgccaggtacagcgcagcaggtgtacccagcccgcccagaccgataatcagcacctggctgtcgagcagtttttgctgcccgtccagagcgatatcgtcgagcaggatttggcggctataacgcataaagtcacggtcattcatcgccaactcctgcaatttccagcaactgtgccgttgccaaacgccagtctgcggcttgagtaatggcgctgacgacggcgatactgccgacacccgttgctatcaccgcaggcgcgcgtgccagactgataccgccaatcgccacggtgggataatccgccagtcgctcaacatgccgtgccagctgttccagcccctgcggtgcagaaggcatctgtttggtttgcgtcgggaacacatgtcccagcgcgatataagaggggcgtgctgccagcgcgacgtcgatttccatatcgtcatgtgtcgaaacgcccagccgcaggcctgccgcgcggatggcattgagatcggtggcttgcaaatcttcctgccccaaatggacgccatacgcctgatgcttgatcgccagccgccagtaatcgttgataaacaatcgcgcgttatagcggcggcccagcgcaattgccgccacgacatcggcttccacctcttcatcgcgccgatctttgatgcgtagctggagagtacgtacgcctgcatccaacagacgttcgatccactgtacgctgtccaccaccgggtacagtcctgaacgaaaaggtacaggaggaaaatcaggctgatacatcacgcttcctccttacgcaggtagatttctccgcctctggcacggaagttctccgacatatccgccattcccatttcaatagtttgcgtggcggcgtaatcacgcacttcctggctgattttcatcgagcagaatttcggcccacacatggagcaaaaatgggcgactttacctgactcttgcggcagggtttcatcgtgataagcgcgggcggtaaacgggtcgagggccagattaaactggtcttcccagcgaaattcgaagcgggctttcgacatggcgttatcgcgaatttgcgcgcccggatgccctttcgccaggtcagcggcgtgggcagcaatcttataggtgataagcccctgcttaacatcttctttattgggcagacccagatgctcttttggcgttacgtaacagagcatcgcgcagccaaaccagccaatcatcgccgcaccaatccccgacgtgaagtggtcatagcccggcgcaatatcggtagttagcggccccagagtgtaaaacggcgcttcgtggcagtgctctaactcctcggtcatattgcggcggatcatctgcatcggcacgtggcctgggccttcaatcatcacctgcacgtcatattcccaggcaattttggtcagttcgcccagcgtatgcagctcggcaaactgcgcttcatcgttggcgtcctgaatagaaccggggcgcagaccgtcgcccagcgacagcgaaacgtcataagcggcacagatttcacaaatttcgcggaagtgttgatagaggaaattttcctgatgatgggagaggcaccatttcgccataatcgaaccgccgcgagagacgataccggtcaggcgtttcgcggtcatcggcacatagcgcagcagtacgcccgcatggatagtgaagtaatccacaccttgctcggcctgttccagcagcgtgtcgcggaacgcttcccaggtaagatcttcggcgatcccgttaaccttctccagcgcctggtagatcggcactgtaccgatcggcaccgggctgttacgcaaaatccactcgcgggtttcgtgaatatagcgaccggtggagagatccatcaccgtatccgctccccagcgcgtggaccataccagcttttccacttcttcttcgatggaagaggtgaccgccgagttgccgatattggcgttaacttttaccaggaaattgcgaccaataatcatcggctccgattccggatgattaatgttggccgggataatcgcacgtccggcagcaacttcatcacggacaaattccgcagtgatattttccggcagatgtgcgccaaagctcattcccggatgctggtggcgtaaaacctcgctacggatgcgctcgcggcccatattctcgcggatggcgatgaattccatttccggcgtgatgatgccctggcgggcgtagtgcagttgggtgacacggcgtcctgctttggcgcgttttggtgttagtacgccgctaaaacgcagttcgtcgaggccatcatctgccagccgcgctttagtgtaatcggaactgcgcacggtaagttcttcggtatcgccgcgcgcatcgatccacggctggcgtagttttgccagcccttgctgcacgttaatggcaatctgcggatcaccatacgggccggaggtgtcgtagaccggaatcgcttcgttttcttcgtactgcggctgttctttgctaccgccaattagcgtcgggctaagctggatctcacgcatcggcacgcgcacgccggggtgtgtgccagtgatataaatgcgttttgagttgggaaaggcggtgccttccagggtgtcgataaaatgttgggcccgggcgcgttgttcgcggcgggtcagttttgttgcagacatagctcattccaaaaagttaaggacgtggcttgtcagacgacggatgaagcaagagacgatcgccgcaggggcgatgcgatagcagattaactcttgttcccttcgcaggtattagcctgatcaggttccgcggatcccgaataaacggtctcagccagttaaggcactccgacaagaaattagccccgcaaatggggcattgaatgtaaattacgcgttaacagcgcagaactcaagcaggatgtttgacgcgggcggcgtcaagcaccagcagaatcagcttatcttccagcacaaagcgcgcttccagcgcctcgccgatgtcagataaaacctgttgaaactcaaggtaattatcatgatcgatggcggtttccagactggaatcgtagtaatccataatctgttgagtattggcttcgagttgcggccaaatcttcgcggcgcgcgcgagttgcccgttgccttccagcttatgaagaatgcgctcataaatactgaaatgtccggcagacaagtaatcgaccaggctctgacaaaaatcatcaagggctttttcgtttagcctcatgtacgattctttgccaggcttaatgccaaccagattgtagtaagccacgagcagatgcttacgtacatgtagccagcgatcaaccagtttgttacttcctctgacgcgctccgtcaggttatcgagctggttaagcatgattgactccgcaagtttgtattcaaaaactgctcagtgagaaatgtaaaaaccatgttaaacatgccagtgatgcaaaggtagtgcaagagctatggatcgtataattgaaaaattagatcacggctggtgggtcgtcagccatgaacaaaaattatggttgccgaagggagaattgccatatggcgaacgggcaaatttcgatcttgtgggtcagcgcgcactacaaatcggcgaatggcagggggaacctgtttggttagtacaacagcagcggcgtcacgatatggggtcggtacgtcaggtcattgatctcgatgttgggctgtttcaactggccggacgaggcgtacaactggcggagttttaccgatcgcataaatactgtggttactgcgggcatgaaatgtatccgagcaaaaccgaatgggcgatgctgtgcagccattgccgtgagcgttactacccgcaaatcgccccctgcattattgttgccatccgtcgcgatgattcgatcctcctcgcccagcatacccgccatcgtaacggtgtccatacagtacttgccggattcgtcgaagtgggcgaaaccctcgagcaggcagtcgcgcgggaagtgatggaagagagcggaattaaagttaaaaacttgcgttacgtgacttctcagccgtggccgtttcctcagtctttaatgaccgcgtttatggcggaatatgacagcggcgacatcgtgatcgacccgaaagaattgctcgaggcgaactggtatcgctatgacgatttgccgttactcccgccgcccggcaccgtagcgcgccgtctgatagaagatacggtggcgatgtgtcgggcagagtatgagtgatgatacactgaccgcctgacgcactaaggaacagccaaaatgaccgaacttaaaaacgatcgttatctgcgggcgctgctgcgccagcccgttgatgtcactccagtatggatgatgcgccaggcgggtcgctatctaccggaatataaagccacgcgcgcccaggcaggcgattttatgtcgctgtgcaaaaacgccgagctggcgtgcgaagtgactttgcaaccgctgcgtcgctacccgctggatgcggcgatcctcttttccgatatcctcaccgtgccggacgcgatggggttagggctctattttgaagccggagaaggtccgcgttttacctcgccagtcacctgcaaagctgacgtcgataaactgccaattccggacccggaagatgaactgggttacgtgatgaacgcggtgcgtaccattcgtcgcgaactgaaaggcgaagtgccgctgattggtttttccggcagcccgtggacgctggcgacctacatggtggaaggcggcagcagcaaagccttcaccgtgatcaaaaaaatgatgtatgccgatccgcaggcgctgcacgctctgctcgataaactggcgaaaagcgtcactttgtatctgaatgcgcagattaaagccggtgctcaggcagtgatgattttcgacacctggggcggcgtgcttaccgggcgcgattatcaacagttctcgctctattacatgcataaaattgttgatggtttactgcgtgaaaacgacggtcgccgcgtaccggtcacgctgtttaccaaaggcggcggacagtggctggaagccatggcagaaaccggttgcgatgcgctgggcctcgactggacaacggacatcgccgatgcgcgccgccgtgtgggcaataaagtcgcgttgcagggtaatatggatccgtcgatgctgtacgcgccgcctgcccgcattgaagaagaagtagcgactatacttgcaggtttcggtcacggcgaaggtcatgtctttaaccttggtcacggcattcatcaggatgtgccgccagaacatgctggcgtgttcgtggaggcagtgcatcgactgtctgaacagtatcaccgctaaggagtgattatggatctcgcgtcattacgcgctcaacaaatcgaactggcttcttctgtgatccgcgaggatcgactcgataaagatccaccggatctgatcgccggagccgatgtcgggtttgagcagggcggagaagtgacgcgagcggcgatggtgctgctgaaatatccctcgcttgagctggtcgagtataaagttgcccgcatcgccaccaccatgccttacattccaggttttctttccttccgcgaatatcctgcgctgctggcagcgtgggagatgctgtcgcaaaagccggatttagtgtttgtcgatggtcatgggatctcgcatcctcgccgtcttggcgtcgccagccattttggcttattggtggatgtgccgaccattggcgtggcgaaaaaacggctctgcggtaaattcgaaccgctctccagcgaaccgggcgcgctggccccactgatggataaaggcgagcagctggcctgggtctggcgcagcaaagcgcgctgtaacccgttgtttatcgctaccggccatcgggtcagcgtggacagcgcgctggcgtgggtacaacgctgcatgaaaggctatcgtctgccggagccaacgcgctgggcggacgcggtggcctcggaacgtccggcgttcgtgcgctatacagcaaatcagccctaattcaggtaaactgcggataatttccgtatttgagaactcaacatgttacaaaacccaattcatctgcgtctggagcgcctggaaagctggcagcatgtcactttcatggcttgcttatgcgaacgcatgtaccccaattacgccatgttctgccagcaaaccggttttggtgatgggcaaatttaccgtcgcattctcgatctcatctgggaaacgctgaccgttaaagacgcaaaagtaaatttcgacagccaactggagaaatttgaagaagcgattccttcagccgacgatttcgatctgtacggcgtttatccggcaatcgatgcctgcgtggcgttaagtgaactggtccattcgcgtttgagtggtgaaacgctcgaacacgcggtggaagtgagtaagacctccatcacgaccgttgcgatgctggaaatgactcaggctggtcgcgaaatgagcgatgaagagcttaaagaaaacccagctgtagagcaagaatgggacattcagtgggaaatattccgacttttagctgagtgcgaagaacgcgatatcgagctgataaaaggccttagggcagacctgcgtgaggcgggtgagagcaatattggtataatttttcagcaataagaccagaaaacgtgatttaacgcctgatttgtcgtacctggagtcttccctttcgccccccgtctggtctacatttggggggcgaaaaaaagtggctatcggtgcgtgtatgcaggagagtgctattctggcatttccgtcgcactcgatgcttagcaagcgataaacacattgtaaggataacttatgaacaagactcaactgattgatgtaattgcagagaaagcagaactgtccaaaacccaggctaaagctgctctggagtccactctggctgcaattactgagtctctgaaagaaggcgatgctgtacaactggttggtttcggtaccttcaaagtgaaccaccgcgctgagcgtactggccgcaacccgcagaccggtaaagaaatcaaaattgccgcagctaacgtaccggcatttgtttctggcaaggcactgaaagacgcagttaagtaagattgcgtggcagtgaacagttttaacgaaggggtggtttcaccccttttgtctttctggcgtcgatcattgatgctggctggcgctctgcttctcactgcctgtagtcataactcttcacttcctccctttaccgccagtggatttgctgaagaccagggcgcggtacgcatctggcgaaaagacagcggcgataatgtgcatctgcttgccgtgtttagcccgtggcgcagtggcgataccacgacgcgagagtatcgctggcagggcgataacctcacgctcatcaatatcaatgtttacagcaaaccgccggtgaatattcgcgcgcgttttgacgatcgcggtgatctgagctttatgcaacgtgaatccgatggggaaaagcagcagctttctaacgaccaaatcgatttataccgttatcgtgctgatcagatccgccagattagcgatgccttacgtcaggggagagtcgtgctgcgccaggggcgctggcatgcgatggaacagaccgtgaccacctgcgaagggcaaaccattaaacctgatttagattcgcaggcgatagcgcatatcgagcgccgccagagccgctcttctgttgatgtcagcgtggcatggctggaagcgcccgaaggttcgcaattactgttagtggcaaactctgatttctgtcgctggcaacccaacgagaaaacgttctgatttaccagtggcccatacccatatgaccgccaccaccgcagccgccgtagcccatgcccattccggctccgcgcggaatacccgcttcagccatcgcgatatctcgtttcacccgtaactcatctaacgactgacgcaaattctccatctctttggcgaccgcgttaattttgctgctatccggtgggttcgcggctaacagggcattgtattcataacgcttcgtcaccagttgctgttgcagtgcgctgctttgagcgtaaaagtcattatggattttctgccacgctgtctgttgttcgctggtcaaaggcgcggcattttgctgccacataccgtgtccgccgtgagcaaatgcagatgtcgatcccatcgccattgctgaaagcgccatcattaccagggcaattttcgtgttccgtttcatggttaatcctccagtggttgtcttacttcgggtattgcatcttccgtgccaacgatgaaacgctgatatgacgggtaatctggcatgataaacgagtaaaaatgactcgcctgctgcgggtagcgagtcatttttactcattgaaacttaagcctttgtgttacagcgcagggtaagcgctgataaaagatggcatgatttctgctgtcagaaagggatgagcaggcaaagaagaagatgcgttttatgcaacgttctaaagactccttagctaaatggttaagcgcgatcctccccgtggtcattgttgggctggtgggattgtttgcggtaactgtgattcgtgattatgggcgggcaagcgaggcagaccgccaggcattactggaaaaaggtaatgtgcttatccgcgctctggagtcgggaagccgcgtagggatggggatgcgaatgcaccatgtacagcaacaggcgcttctggaagagatggcgggacagccgggagtgttgtggttcgcagtcaccgatgcgcagggcatcattattcttcatagcgaccccgataaggtcgggcgtgcgctctattcgccggatgaaatgcagaaattaaagccagaggaaaactcccgctggcggctgcttgggaaaacggaaactacgcctgcacttgaggtctatcgtttgttccagccaatgtcagcgccctggcggcatggaatgcacaatatgccgcgctgtaacggcaaagctgtgccacaagtagatgcacaacaggctatttttatcgccgttgatgccagtgatctggttgcaacccagagtggggaaaagcgcaataccctgattatcctcttcgccctggcgacggtcttgctggcaagcgtattgtcattcttctggtatcgccgctatctgcgctcgcgccagcttctacaagatgaaatgaagcgcaaagagaagctggtggcgctggggcatcttgcggcaggcgttgcccacgaaatccgtaacccactttcctcgattaaaggactggcgaaatactttgccgagcgcgcgcctgcagggggagaagcgcatcaactggcgcaggtgatggcgaaagaggccgaccgtttaaaccgcgtggtaagcgagttgctggaactggttaagccaacgcatctggctttgcaggcggtggatctcaacacgctgattaaccactcattacagctggtaagtcaggatgcaaacagccgggagatccagttacgctttaccgccaacgacacattaccggaaattcaggccgacccggacaggctgactcaggtcctgttgaatctctatctcaatgctattcaggcgattggtcagcatggcgtgattagcgtgacggccagcgaaagcggcgcgggcgtgaaaatcagcgttaccgacagcggtaagggaattgcggcagatcagcttgatgccatcttcactccgtacttcaccactaaagccgaaggcaccggattggggctggcggtcgtgcataatattgttgaacaacacggtggtacaattcaggtcgcaagccaggagggaaaaggctcaacgttcaccctctggcttccggtcaatattacgcgtaaggacccacaaggatgacgcacgataatatcgatattctggtggtggatgatgacattagccactgcactattttgcaggctttactgcgcggctggggctataacgtcgcgctggcgaacagcgggcgacaggcgttggagcaggtgcgggaacaggtttttgatcttgtgctttgcgatgtgcgaatggcggagatggacggcatcgccacgctgaaagagatcaaagcgttaaacccggcaattccggtgctgattatgactgcgtactccagcgtcgagacggcggtagaggcactgaaaactggggcgctggattatctcatcaagccgctggatttcgataacctacaggcgacgctggaaaaagcgctcgcgcatacgcacagtattgatgctgaaacacctgcggtgactgccagccagttcggtatggtcggtaaaagcccggcgatgcaacacctgctcagtgaaatcgccctcgtcgcgccatcggaagccacggtactgatccacggcgattccggcaccggtaaagagctggtcgccagggcgattcacgccagtagcgcacgtagcgaaaaaccgctggtaacgctcaactgtgcggcactcaacgaatccttgctggaatctgaattgttcggtcacgaaaaaggggcgtttactggagccgataaacgccgggaagggcgctttgttgaggcggacggcggcacgctgtttctcgatgaaattggcgatatctcgccgatgatgcaggtgcgtctgctgcgtgcgattcaggagcgcgaagttcagcgtgtcggtagcaaccagattatctcggttgatgtccggctgattgcggcgacccatcgcgatcttgccgcagaggtgaatgccgggcgttttcgccaggatctctactatcgcctgaatgtggtggcgattgaagtaccatcgctgcggcaacggcgggaagatatccctctgctggctggccattttctgcagcgctttgccgagcgtaatcgcaaggcggtaaaaggttttacgccccaggcgatggatctgttgattcattacgactggccgggaaatattcgtgagctggaaaacgcggtggaacgggcagtggtgctgctgaccggggaatatatttccgaacgcgagctgccgctggcgattgccagtacgccgatcccgctgggacaaagtcaggatattcagccgttggtggaagtggaaaaagaggtgattctggcggcgctggagaaaacgggcggcaacaaaaccgaagccgcccgtcagttagggatcacgcgcaaaacgctattggcaaaactgtcgcgttagttctgctcgcgttcgatagcgcgccagccgatatctttccggcagaagcagtcgtcccagtggatatcggtcattaaggcataggcgcgtttctgcgcttctgccacggtatgacccagcgcggtgacgcacagtacgcgcccgccgttggtcactacctgctcgtcatccgccagttttgtgcccgcgtggaacactttgccgcctgccacttcttccagcggcaggccgtggatcacgtcaccggtgcggtaatcacccggatatccacccgcagccatcaccacgccgagagaagcgcgttcatcccactcggacgttttctcgtccagtttgctttcacaggccgccaggcagagctcaaccagatcggacttcatgcgcagcataatcggctgggtttccggatcgccaaagcggcagttaaattcaataaccttcggattgccctgtttgtcgatcatcaggcccgcgtagagaaaaccggtgtaggtgttgccttccgccgccatgcctttcacggttggccagataatacgttccatggtgcgctgatgaacgtcatcggttactaccggcgcgggggagtaagcgcccatcccgccggtgtttggtccggtatctttatcgcctacgcgtttgtgatcctggctggtagccatcggcagcacatgctcgccgtccaccatcacgataaagctcgcttcttcgccatcgaggaactcttcgataacgatgcgatgacccgcgtcgccaaaagcgttgcccgccagcatatcgtgaacagccgcttccgcttcttccagcgtcatcgccacgataacgcctttcccggcagccagaccgtccgctttaatgacgattggcgcgcctttctcacgcagatacgccagcgcaggttctacctcggtgaagttctggtattccgccgtagggatcttatggcgggccaggaaatctttggtaaacgcttttgagccttccagttgggccgcacctgcggttgggccgaagattttcagcccggcggcgcggaaggtatcgaccacgcctttcaccagcggcgcttccgggccgacgatggtcagatcaatcttttcgttttgtgcgaaatccaacagcgccgggatatcggtcacgccaatagcaacgttttgcagcgcgggttccagtgcagtgcctgcattacccggagcaacaaaaacagtctcaaccagcggcgactgggccgctttccaggccagcgcgtgctcgcgcccgccgttaccaatcactaatactttcatctattgctccattaatggcggaagtggcgcatgtcggtgaagagcatcgcaataccgtgctcgtcggcggcggcaatcacttcgtcatcacggatagaaccgccaggctggattacgcaggtcacgcccgcagcggcggcggcatcaataccgtcgcggaacgggaagaacgcgtcagaagccatcgaggaacctttcacttccaggccttcatcggccgctttaataccggcgatttttgcggagtacacgcggctcatctggcccgcgccaatgccgatagtcatattgtttttggcatagacgatagcgttggatttcacaaacttcgccaccttccagcagaacagcgcatcacgcagttcctgttcgctcggctgacgtttggtcaccacgcgcagttcttccgcaccgaccatccccaggtcacgatcctgaaccagcagaccgccgttcacgcgtttgaaatcgaggcccggaacacgctcgccccactgaccgcaggtcagaacgcgtacgttctgtttggcggcggtgattttcagggcttcttcgctggcggacggcgcaataatcacttcgacaaactgacgagaaatgatggcctgtgcggtttccgcatccagctcgcggttaaaggcaatgatgccgccgaatgcggaggttgggtcggttttgtacgcgcgatcgtaagcatcaagaatggaattgccgatagccacgccgcaagggttggcgtgcttcacaatcacacatgccggctcggcgaactctttcacgcactccagcgccgcatcggtatcggcgatgttgttataagagagggctttaccctgaacctgggttgcggtagcaacggaggcttctttcacattctcttctatatagaaggcagcctgctggtggctgttctcgccgtaacgcatatccagcttcttaatgaagttcaggttcagcgtgcgtgggaagcgaccggcggcttctttgctttcaccgtggtaagccggaaccatgctgccgaagtagttggcaatcatgctgtcgtaggcggcagtgtgttcgaaggctttgatggcgaggtcgaaacgggttgcaagcgtcagcgatccttcgttgtcatccatctctttaataatggcgtcatagtcgctgctcttcaccacgattgcgacatctttatggttcttggcggcggagcgcaccatcgttgggccgccgatatcgatgttctcaaccgcatcttccagcgagcaaccttcacgggccacggtctgggcgaacggatacaggttaacaaccaccatatcgataggctggatctgatgttcttccataatggcatcgtcctggccgcgacggcccagaatgccaccatgtactttcggatgcagggtcttcacgcgtccatccatcatctccgggaaaccggtgtaatcggaaacttcggttaccggcagacctttttctgctaacagacgggcagtgccccctgtagacagcagctccacaccgcgtgcggaaagtgcctgggcgaattcgacgataccggctttgtcagaaacactgagcagagcgcggcggactggacgacgttgttgcatggtaaatcccctggatttgactattacagagagcgttagctgaatttttcgcgaaaaactcagctaacgcccctaacggggcatccttatttttcgcccgcattgtaacgaaaacgtttgcgcaacgctcgcgaatttttctctttcaatggtgatcacaattttgactgtggttaccgtgggcaaaatacagaaattacattgatgattgtggataactctgtgcgtaaaaaggtataaagcgggcttttgctggggaatgcagcagtcagtcatttttctgcaatttttctattgcggcctgcggagaactccctataatgcgcctccatcgacacggcggatgtgaatcacttcacacaaacagccggttcggttgaagagaaaaatcctgaaattcagggttgactctgaaagaggaaagcgtaatatacgccacctcgcgacagtgcgctaaagcgcgtcgcaactgctctttaacaatttatcagacaatctgtgtgggcactcgaagatacggattcttaacgtcgcaagacgaaaaatgaataccaagtctcaagagtgaacacgtaattcattacgaagtttaattctttgagcatcaaacttttaaattgaagagtttgatcatggctcagattgaacgctggcggcaggcctaacacatgcaagtcgaacggtaacaggaagaagcttgcttctttgctgacgagtggcggacgggtgagtaatgtctgggaaactgcctgatggagggggataactactggaaacggtagctaataccgcataacgtcgcaagaccaaagagggggaccttcgggcctcttgccatcggatgtgcccagatgggattagctagtaggtggggtaacggctcacctaggcgacgatccctagctggtctgagaggatgaccagccacactggaactgagacacggtccagactcctacgggaggcagcagtggggaatattgcacaatgggcgcaagcctgatgcagccatgccgcgtgtatgaagaaggccttcgggttgtaaagtactttcagcggggaggaagggagtaaagttaatacctttgctcattgacgttacccgcagaagaagcaccggctaactccgtgccagcagccgcggtaatacggagggtgcaagcgttaatcggaattactgggcgtaaagcgcacgcaggcggtttgttaagtcagatgtgaaatccccgggctcaacctgggaactgcatctgatactggcaagcttgagtctcgtagaggggggtagaattccaggtgtagcggtgaaatgcgtagagatctggaggaataccggtggcgaaggcggccccctggacgaagactgacgctcaggtgcgaaagcgtggggagcaaacaggattagataccctggtagtccacgccgtaaacgatgtcgacttggaggttgtgcccttgaggcgtggcttccggagctaacgcgttaagtcgaccgcctggggagtacggccgcaaggttaaaactcaaatgaattgacgggggcccgcacaagcggtggagcatgtggtttaattcgatgcaacgcgaagaaccttacctggtcttgacatccacggaagttttcagagatgagaatgtgccttcgggaaccgtgagacaggtgctgcatggctgtcgtcagctcgtgttgtgaaatgttgggttaagtcccgcaacgagcgcaacccttatcctttgttgccagcggtccggccgggaactcaaaggagactgccagtgataaactggaggaaggtggggatgacgtcaagtcatcatggcccttacgaccagggctacacacgtgctacaatggcgcatacaaagagaagcgacctcgcgagagcaagcggacctcataaagtgcgtcgtagtccggattggagtctgcaactcgactccatgaagtcggaatcgctagtaatcgtggatcagaatgccacggtgaatacgttcccgggccttgtacacaccgcccgtcacaccatgggagtgggttgcaaaagaagtaggtagcttaaccttcgggagggcgcttaccactttgtgattcatgactggggtgaagtcgtaacaaggtaaccgtaggggaacctgcggttggatcacctccttaccttaaagaagcgttctttgcagtgctcacacagattgtctgatagaaagtgaaaagcaaggcgtcttgcgaagcagactgatacgtccccttcgtctagaggcccaggacaccgccctttcacggcggtaacaggggttcgaatcccctaggggacgccacttgctggtttgtgagtgaaagtcacctgccttaataatctcaaaactcatcttcgggtgatgtttgagatatttgctctttaaaaatctggatcaagctgaaaattgaaacactgaacaacgaaagttgttcgtgagtctctcaaattttcgcaacacgatgatgaatcgtaagaaacatcttcgggttgtgaggttaagcgactaagcgtacacggtggatgccctggcagtcagaggcgatgaaggacgtgctaatctgcgataagcgtcggtaaggtgatatgaaccgttataaccggcgatttccgaatggggaaacccagtgtgtttcgacacactatcattaactgaatccataggttaatgaggcgaaccgggggaactgaaacatctaagtaccccgaggaaaagaaatcaaccgagattcccccagtagcggcgagcgaacggggagcagcccagagcctgaatcagtgtgtgtgttagtggaagcgtctggaaaggcgcgcgatacagggtgacagccccgtacacaaaaatgcacatgctgtgagctcgatgagtagggcgggacacgtggtatcctgtctgaatatggggggaccatcctccaaggctaaatactcctgactgaccgatagtgaaccagtaccgtgagggaaaggcgaaaagaaccccggcgaggggagtgaaaaagaacctgaaaccgtgtacgtacaagcagtgggagcacgcttaggcgtgtgactgcgtaccttttgtataatgggtcagcgacttatattctgtagcaaggttaaccgaataggggagccgaagggaaaccgagtcttaactgggcgttaagttgcagggtatagacccgaaacccggtgatctagccatgggcaggttgaaggttgggtaacactaactggaggaccgaaccgactaatgttgaaaaattagcggatgacttgtggctgggggtgaaaggccaatcaaaccgggagatagctggttctccccgaaagctatttaggtagcgcctcgtgaattcatctccgggggtagagcactgtttcggcaagggggtcatcccgacttaccaacccgatgcaaactgcgaataccggagaatgttatcacgggagacacacggcgggtgctaacgtccgtcgtgaagagggaaacaacccagaccgccagctaaggtcccaaagtcatggttaagtgggaaacgatgtgggaaggcccagacagccaggatgttggcttagaagcagccatcatttaaagaaagcgtaatagctcactggtcgagtcggcctgcgcggaagatgtaacggggctaaaccatgcaccgaagctgcggcagcgacgcttatgcgttgttgggtaggggagcgttctgtaagcctgcgaaggtgtgctgtgaggcatgctggaggtatcagaagtgcgaatgctgacataagtaacgataaagcgggtgaaaagcccgctcgccggaagaccaagggttcctgtccaacgttaatcggggcagggtgagtcgacccctaaggcgaggccgaaaggcgtagtcgatgggaaacaggttaatattcctgtacttggtgttactgcgaaggggggacggagaaggctatgttggccgggcgacggttgtcccggtttaagcgtgtaggctggttttccaggcaaatccggaaaatcaaggctgaggcgtgatgacgaggcactacggtgctgaagcaacaaatgccctgcttccaggaaaagcctctaagcatcaggtaacatcaaatcgtaccccaaaccgacacaggtggtcaggtagagaataccaaggcgcttgagagaactcgggtgaaggaactaggcaaaatggtgccgtaacttcgggagaaggcacgctgatatgtaggtgaggtccctcgcggatggagctgaaatcagtcgaagataccagctggctgcaactgtttattaaaaacacagcactgtgcaaacacgaaagtggacgtatacggtgtgacgcctgcccggtgccggaaggttaattgatggggttagcgcaagcgaagctcttgatcgaagccccggtaaacggcggccgtaactataacggtcctaaggtagcgaaattccttgtcgggtaagttccgacctgcacgaatggcgtaatgatggccaggctgtctccacccgagactcagtgaaattgaactcgctgtgaagatgcagtgtacccgcggcaagacggaaagaccccgtgaacctttactatagcttgacactgaacattgagccttgatgtgtaggataggtgggaggctttgaagtgtggacgccagtctgcatggagccgaccttgaaataccaccctttaatgtttgatgttctaacgttgacccgtaatccgggttgcggacagtgtctggtgggtagtttgactggggcggtctcctcctaaagagtaacggaggagcacgaaggttggctaatcctggtcggacatcaggaggttagtgcaatggcataagccagcttgactgcgagcgtgacggcgcgagcaggtgcgaaagcaggtcatagtgatccggtggttctgaatggaagggccatcgctcaacggataaaaggtactccggggataacaggctgataccgcccaagagttcatatcgacggcggtgtttggcacctcgatgtcggctcatcacatcctggggctgaagtaggtcccaagggtatggctgttcgccatttaaagtggtacgcgagctgggtttagaacgtcgtgagacagttcggtccctatctgccgtgggcgctggagaactgaggggggctgctcctagtacgagaggaccggagtggacgcatcactggtgttcgggttgtcatgccaatggcactgcccggtagctaaatgcggaagagataagtgctgaaagcatctaagcacgaaacttgccccgagatgagttctccctgactccttgagagtcctgaaggaacgttgaagacgacgacgttgataggccgggtgtgtaagcgcagcgatgcgttgagctaaccggtactaatgaaccgtgaggcttaaccttacaacgccgaaggtgttttggcggattgagagaagattttcagcctgatacagattaaatcagaacgcagaagcggtctgataaaacagaatttgcctggcggcagtagcgcggtggtcccacctgaccccatgccgaactcagaagtgaaacgccgtagcgccgatggtagtgtggggtctccccatgcgagagtagggaactgccaggcatcaaattagaaaaaccccggtccataaggccggggttttttgcatatcaattatttgcatgatgaagggaatctcatgtcagttctgtatatccaaattcgtcgtaatcaaattactgttcgcgatcttgaaagcaaacgtgaagtgtcaggagacgctgccttcagtaaccagcgcctgttaatcgccaatttctttgttgcagaaaaagttctgcaagatcttgttctgcaactccacccacgttcaacctggcattcttttttgccagcaaaacgtatggatattgttgtgagcgcactggaaatgaatgagggcggtttgtcacaggttgaggaacgcattctccatgaagtggtcgctggggcaacgttaatgaaatatcgccagttccacatccatgcgcaatcagcggtactcagtgatagtgcggtcatggcaatgcttaagcagaaataatcgtgtcaccattggtgggtactaaacctgaagttcagcccaccgggatgagaaaaaatcgcctacgcccccacatacgccagattcagcaacggatacggtttccccaaatcgtccacctcagagcgtcccgtaaccttaaaacccaccttcttatagaacccaaccgcctgctcattttgctcattaacgttggttgtcagttccggtgccatcgagagcgcatgctccaccagcacccgacctacgccgcagccgcgcacatcaggatcgataaacagcgcatccatatgctgcccacttagcaacataaatccaaccggctgatcccgctcattaaccgcgacccacaacggcgcttccggcaggaaggaacgaactaggtcctccagctcggtccgatactctgctgatagaaaatcgtgagtggcatcgacagaacgacaccaaatcgcaacgagttcctccccttcctcatgccgtgagcggcgaatactaataaccattttctctccttttagtcattcttatattctaacgtagtcttttccttgaaactttctcaccttcaacatgcaggctcgacattggcaaattttctggttatcttcagctatctggatgtctaaacgtataagcgtatgtagtgaggtaatcaggttatgccgattcgtgtgccggacgagctacccgccgtcaatttcttgcgtgaagaaaacgtctttgtgatgacaacttctcgtgcgtctggtcaggaaattcgtccacttaaggttctgatccttaacctgatgccgaagaagattgaaactgaaaatcagtttctgcgcctgctttcaaactcacctttgcaggtcgatattcagctgttgcgcatcgattcccgtgaatcgcgcaacacgcccgcagagcatctgaacaacttctactgtaactttgaagatattcaggatcagaactttgacggtttgattgtaactggtgcgccgctgggcctggtggagtttaatgatgtcgcttactggccgcagatcaaacaggtgctggagtggtcgaaagatcacgtcacctcgacgctgtttgtctgctgggcggtacaggccgcgctcaatatcctctacggcattcctaagcaaactcgcaccgaaaaactctctggcgtttacgagcatcatattctccatcctcatgcgcttctgacgcgtggctttgatgattcattcctggcaccgcattcgcgctatgctgactttccggcagcgttgattcgtgattacaccgatctggaaattctggcagagacggaagaaggggatgcatatctgtttgccagtaaagataagcgcattgcctttgtgacgggccatcccgaatatgatgcgcaaacgctggcgcaggaatttttccgcgatgtggaagccggactagacccggatgtaccgtataactatttcccgcacaatgatccgcaaaatacaccgcgagcgagctggcgtagtcacggtaatttactgtttaccaactggctcaactattacgtctaccagatcacgccatacgatctacggcacatgaatccaacgctggattaatcttctgtgatagtcgatcgttaagcgattcagcaccttacctcaggcaccttcgggtgccttttttatttccgaaacgtacctcagcaggtgaataaattttattcatattgttatcaacaagttatcaagtatttttaattaaaatggaaattgtttttgattttgcattttaaatgagtagtcttagttgtgctgaacgaaaagagcacaacgatccttcgttcacagtggggaagttttcggatccatgacgaggagctgcacgatgactgaacaggcaacaacaaccgatgaactggctttcacaaggccgtatggcgagcaggagaagcaaattcttactgccgaagcggtagaatttctgactgagctggtgacgcattttacgccacaacgcaataaacttctggcagcgcgcattcagcagcagcaagatattgataacggaacgttgcctgattttatttcggaaacagcttccattcgcgatgctgattggaaaattcgcgggattcctgcggacttagaagaccgccgcgtagagataactggcccggtagagcgcaagatggtgatcaacgcgctcaacgccaatgtgaaagtctttatggccgatttcgaagattcactggcaccagactggaacaaagtgatcgacgggcaaattaacctgcgtgatgcggttaacggcaccatcagttacaccaatgaagcaggcaaaatttaccagctcaagcccaatccagcggttttgatttgtcgggtacgcggtctgcacttgccggaaaaacatgtcacctggcgtggtgaggcaatccccggcagcctgtttgattttgcgctctatttcttccacaactatcaggcactgttggcaaagggcagtggtccctatttctatctgccgaaaacccagtcctggcaggaagcggcctggtggagcgaagtcttcagctatgcagaagatcgctttaatctgccgcgcggcaccatcaaggcgacgttgctgattgaaacgctgcccgccgtgttccagatggatgaaatccttcacgcgctgcgtgaccatattgttggtctgaactgcggtcgttgggattacatcttcagctatatcaaaacgttgaaaaactatcccgatcgcgtcctgccagacagacaggcagtgacgatggataaaccattcctgaatgcttactcacgcctgttgattaaaacctgccataaacgcggtgcttttgcgatgggcggcatggcggcgtttattccgagcaaagatgaagagcacaataaccaggtgctcaacaaagtaaaagcggataaatcgctggaagccaataacggtcacgatggcacatggatcgctcacccaggccttgcggacacggcaatggcggtattcaacgacattctcggctcccgtaaaaatcagcttgaagtgatgcgcgaacaagacgcgccgattactgccgatcagctgctggcaccttgtgatggtgaacgcaccgaagaaggtatgcgcgccaacattcgcgtggctgtgcagtacatcgaagcgtggatctctggcaacggctgtgtgccgatttatggcctgatggaagatgcggcgacggctgaaatttcccgtacctcgatctggcagtggatccatcatcaaaaaacgttgagcaatggcaaaccggtgaccaaagccttgttccgccagatgctgggcgaagagatgaaagtcattgccagcgaactgggcgaagaacgtttctcccaggggcgttttgacgatgccgcacgcttgatggaacagatcaccacttccgatgagttaattgatttcctgaccctgccaggctaccgcctgttagcgtaaaccaccacataactatggagcatctgcacatgaaaacccgtacacaacaaattgaagaattacagaaagagtggactcaaccgcgttgggaaggcattactcgcccatacagtgcggaagatgtggtgaaattacgcggttcagtcaatcctgaatgcacgctggcgcaactgggcgcagcgaaaatgtggcgtctgctgcacggtgagtcgaaaaaaggctacatcaacagcctcggcgcactgactggcggtcaggcgctgcaacaggcgaaagcgggtattgaagcagtctatctgtcgggatggcaggtagcggcggacgctaacctggcggccagcatgtatccggatcagtcgctctatccggcaaactcggtgccagctgtggtggagcggatcaacaacaccttccgtcgtgccgatcagatccaatggtccgcgggcattgagccgggcgatccgcgctatgtcgattacttcctgccgatcgttgccgatgcggaagccggttttggcggtgtcctgaatgcctttgaactgatgaaagcgatgattgaagccggtgcagcggcagttcacttcgaagatcagctggcgtcagtgaagaaatgcggtcacatgggcggcaaagttttagtgccaactcaggaagctattcagaaactggtcgcggcgcgtctggcagctgacgtgacgggcgttccaaccctgctggttgcccgtaccgatgctgatgcggcggatctgatcacctccgattgcgacccgtatgacagcgaatttattaccggcgagcgtaccagtgaaggcttcttccgtactcatgcgggcattgagcaagcgatcagccgtggcctggcgtatgcgccatatgctgacctggtctggtgtgaaacctccacgccggatctggaactggcgcgtcgctttgcacaagctatccacgcgaaatatccgggcaaactgctggcttataactgctcgccgtcgttcaactggcagaaaaacctcgacgacaaaactattgccagcttccagcagcagctgtcggatatgggctacaagttccagttcatcaccctggcaggtatccacagcatgtggttcaacatgtttgacctggcaaacgcctatgcccagggcgagggtatgaagcactacgttgagaaagtgcagcagccggaatttgccgccgcgaaagatggctataccttcgtatctcaccagcaggaagtgggtacaggttacttcgataaagtgacgactattattcagggcggcacgtcttcagtcaccgcgctgaccggctccactgaagaatcgcagttctaagcaacaacaaccgttgctgactgtaggccggataaggcgttcacgccgcatccggcaatcggtgcacgatgcctgatgcgacgcttgcgcgtcttatcatgcctacagccgttgccgaacgtaggctggataaggcgtttacgccgcatccggcaattctctgctcctgatgagggcgctaaatgccgcgtggcctggaattattgattgctcaaaccattttgcaaggcttcgatgctcagtatggtcgattcctcgaagtgacctccggtgcgcagcagcgtttcgaacaggccgactggcatgctgtccagcaggcgatgaaaaaccgtatccatctttacgatcatcacgttggtctggtcgtggagcaactgcgctgcattactaacggccaaagtacggacgcggcatttttactacgtgttaaagagcattacacccggctgttgccggattacccgcgcttcgagattgcggagagcttttttaactccgtgtactgtcggttatttgaccaccgctcgcttactcccgagcggctttttatctttagctctcagccagagcgccgctttcgtaccattccccgcccgctggcgaaagactttcaccccgatcacggctgggaatctctactgatgcgcgttatcagcgacctaccgctgcgcctgcgctggcagaataaaagccgtgacatccattacattattcgccatctgacggaaacgctggggacagacaacctcgcggaaagtcatttacaggtggcgaacgaactgttttaccgcaataaagccgcctggctggtaggcaaactgatcacaccttccggcacattgccatttttgctgccgatccaccagacggacgacggcgagttatttattgatacctgcctgacgacgaccgccgaagcgagcattgtttttggctttgcgcgttcttattttatggtttatgcgccgctgcccgcagcgctggtcgagtggctacgggaaattctgccaggtaaaaccaccgctgaattgtatatggctatcggctgccagaagcacgccaaaaccgaaagctaccgcgaatatctcgtttatctacagggctgtaatgagcagttcattgaagcgccgggtattcgtggaatggtgatgttggtgtttacgctgccgggctttgatcgggtattcaaagtcatcaaagacaggttcgcgccgcagaaagagatgtctgccgctcacgttcgtgcctgctatcaactggtgaaagagcacgatcgcgtgggccgaatggcggacacccaggagtttgaaaactttgtgctggagaagcggcatatttccccggcattaatggaattactgcttcaggaagcagcggaaaaaatcaccgatctcggcgaacaaattgtgattcgccatctttatattgagcggcggatggtgccgctcaatatctggctggaacaagtggaaggtcagcagttgcgcgacgccattgaagaatacggtaacgctattcgccagcttgccgctgctaacattttccctggcgacatgctgtttaaaaacttcggtgtcacccgtcacgggcgtgtggttttttatgattacgatgaaatttgctacatgacggaagtgaatttccgcgacatcccgccgccgcgctatccggaagacgaacttgccagcgaaccgtggtacagcgtctcgccgggcgatgttttcccggaagagtttcgccactggctatgcgccgacccgcgtattggtccgctgtttgaagagatgcacgccgacctgttccgcgctgattactggcgcgcactacaaaaccgcatacgtgaagggcatgtggaagatgtttatgcgtatcggcgcaggcaaagatttagcgtacggtatggggagatgcttttttgagtaaagcttccatataatttttctccgcaatgtatcgagggttatccgtaaagccaaagctttcagccatcttatttaatgtattaaggattaattcagcaataacccggtgaccaaattcaaaagccaactcaaaggcagagtatttttgtggggctttgtgttgccaaaaatccataatatcttcagcggtaaatccaaacaggcgtgcatggtcagataaagcaagataaaccgtctctacaacattttgttgtttatgctgtatcgctgaaaacaaaccgggatattcattagaattatttgccaggaggaggggcttcatattttttttatcgaatttaaacgtattaaacagagtgggtaatgcgttaaaaatagtattaataacgttcatgtgtccgcgctgcatggccataaacaaacccgtgtcgcgcgcaagacttttagcggtcagaagatctacaatatcggaagctgaaatgttaatttcctgggctaggctgggcaatgcttcaagaataactttcacgatatcgctatgtccattttgcatcgccagatatagtcctgggcaaccataaaaatcctttgccttcaggagatcgagtacctgttctttagtcaaatgacatgtgcgaattaacaaaggtaacgcgttcaaaacaattttcagcatgtcggcatcaccattcgccataacatggtataaaacatggctggacgttctatttttggcactcaggaatttatacacttgttcgttatctaaatgatgtgttgcggccagtttaggtaaggcgttcagaatcgaggttacaacatttttatccttacgtgatatcgctaaaaataatccagaaaaaccatttttatcttttgcctccagaatatgcatgagattttttttcgagagtaatccttcatatcctgtttctgacaatgaattgaaaatagtctcaacgatatccgcattaccataatttatagccaaatataaacctggcaggttaatactattataggcagtcaacatttctgttctatgtagttctggcattttctggagttgaatcatcagttgcgtaagttggtgattctgaccaattgccattagcaaattcatcgttgcaggtgataatggaggggttatttcatccacagatccttttaacatcaatagctgttctttcggaagtgctggaattattgcaacagattgattaataacatgatcatttgaccatttcaggaggctataatctacattcataaaatccatcagagaatagtgtttaatattctctttgctttcgctcataattcttattttatcgttagttacattaggatcataaaccgaaaccacgtaatgggtacatccttcagttgtgttctttattcttagccggaccgtcaaagcatggttatccaccagtaatatggctgccataacactgatgccatttgattccatcttgtcaaaatatgctttcataactagcccgaaatcaccgcaggcagcaacgcaacgcccctcaggacggctggaaaccaacgccaaagtctggtttttgcattttttgttgaagtgcgtgagaaatttttcagctgaagagtaatcatcttgatggggtttgtaatcaacattctgataaatatcattaatatattgtgcagcaatgtgtcggcatactatacggttttggggtcgccccggaaaataacattgaccattaagtttaattcttgggaattctttttcttttctatctgattttaggtttaattcttgtttatcaagagtgtctgagcgttgaggtaaaatttccattaggtatttttcaaatattggggcaatggtttgagtaagtgtcgtgttttcgtttttattaattatcgtaatttctttcttatcagcttgtaagacggacgtggaaaatttaatgacaaaatccttgttgctaaagatatgacgaccattttgtctacagttctctgagaagctttttaatagaggcgtcgccagctccttgccagaaaatttatcctcgagttctttataaaacaattcactcagggtttggtgttcatttgtctgggctgtattattaatatttgcagagaaagaactacgaggaatacgagtaatcatttaaatatctcattgtttattgatgtcttgaattttaactatcagaacagtgaaaaaatttaatatgattacaactaaagaaatatcataaatcgctcaatctcataatgcagccgtaaaagtttcggtggaatgagatcttgcgattttgttaataattaagtggtttgatgtttaaaaataatgctgagttaataaaagtgtgtgaagtgtatgacattaagttattttggcgtcaatgcgattaacagacacccttattctattgccactcaggtatgatgggcagaatattgcctctgcccgccagaaaaagtcagcgcattccaccgtacgccagcgtcacttccttcgccgctttaatcaccatcgcgccaaactcggtcacgcggtcatcggtaatacgtgaaatcggtccggaaatagaaattgcggcaaacggttcacggtgctcatcgaaaatacacgctgcaaggcaacgtagccccagtgcatgttcctcatcgtcaaatgaataaccccgtttgcgcgtttgggcgagatcttcttttaaatgcacaggagacaccagcgttgcgtgggtataggcatgtaaccctttgcggtgcagcagcttcgtcacctgttcttcgctcagttgggctaaaaaggctttacccgcaccggaagcgtgcatcggcaatttaccgccgataggcgcggacattcgcatcagatgcgtacactgtacctggtcgataataatcgcttcgtgatcgctttgatcaagcaccgccatattgaccgtttcgccagactcttccattagattgcgcaggatagggtgaacaatcgctaacaaattacggctctggagaaagctgctgccgaccataaaggcatgtgcgccgattgcccaatgtcccagttcgccaacctgacgcacgaaaccctgctgttgcatcgtggttagcaggcggtgggtcgtggaattgggtaacccggcttgttgcgccagttccgtgagtgccacactgccattggattcggcaatccactccagtaatttcaggccacgcgttaaagactgaacctgtccagtcgctggtgcggtggcaacggcgggttttctgccgcgtttcgcgggaatgggtgcgaccatgacagtctcttttttctgtatcgtggaaatcattttcatttttattgttagctaatgcaatagttactgaactgatccgatgagttaatgttgaacaaatctcatgttgcgtggtggtcgcttttaccacagatgcgtttatgccagtatggtttgttgaatttttattaaatctgggttgagcgtgtcgggagcaagtgtgagcagcaaagtggaacaactgcgtgcgcagttaaatgaacgtattctggtgctggacggcggtatgggcaccatgatccagagttatcgactgaacgaagccgattttcgtggtgaacgctttgccgactggccatgcgacctcaaaggcaacaacgacctgctggtactcagtaaaccggaagtgatcgccgctatccacaacgcctactttgaagcgggcgcggatatcatcgaaaccaacaccttcaactccacgaccattgcgatggcggattaccagatggaatccctgtcggcggaaatcaactttgcggcggcgaaactggcgcgagcttgtgctgacgagtggaccgcgcgcacgccagagaaaccgcgctacgttgccggtgttctcggcccgaccaaccgcacggcgtctatttctccggacgtcaacgatccggcatttcgtaatatcacttttgacgggctggtggcggcttatcgagagtccaccaaagcgctggtggaaggtggcgcggatctgatcctgattgaaaccgttttcgacacccttaacgccaaagcggcggtatttgcggtgaaaacggagtttgaagcgctgggcgttgagctgccgattatgatctccggcaccatcaccgacgcctccgggcgcacgctctccgggcagaccaccgaagcattttacaactcattgcgccacgccgaagctctgacctttggcctgaactgtgcgctggggcccgatgaactgcgccagtacgtgcaggagctgtcacggattgcggaatgctacgtcaccgcgcacccgaacgccgggctacccaacgcctttggtgagtacgatctcgacgccgacacgatggcaaaacagatacgtgaatgggcgcaagcgggttttctcaatatcgtcggcggctgctgtggcaccacgccacaacatattgcagcgatgagtcgtgcagtagaaggattagcgccgcgcaaactgccggaaattcccgtagcctgccgtttgtccggcctggagccgctgaacattggcgaagatagcctgtttgtgaacgtgggtgaacgcaccaacgtcaccggttccgctaagttcaagcgcctgatcaaagaagagaaatacagcgaggcgctggatgtcgcgcgtcaacaggtggaaaacggcgcgcagattatcgatatcaacatggatgaagggatgctcgatgccgaagcggcgatggtgcgttttctcaatctgattgccggtgaaccggatatcgctcgcgtgccgattatgatcgactcctcaaaatgggacgtcattgaaaaaggtctgaagtgtatccagggcaaaggcattgttaactctatctcgatgaaagagggcgtcgatgcctttatccatcacgcgaaattgttgcgtcgctacggtgcggcagtggtggtaatggcctttgacgaacagggacaggccgatactcgcgcacggaaaatcgagatttgccgtcgggcgtacaaaatcctcaccgaagaggttggcttcccgccagaagatatcatcttcgacccaaacatcttcgcggtcgcaactggcattgaagagcacaacaactacgcgcaggactttatcggcgcgtgtgaagacatcaaacgcgaactgccgcacgcgctgatttccggcggcgtatctaacgtttctttctcgttccgtggcaacgatccggtgcgcgaagccattcacgcagtgttcctctactacgctattcgcaatggcatggatatggggatcgtcaacgccgggcaactggcgatttacgacgacctacccgctgaactgcgcgacgcggtggaagatgtgattcttaatcgtcgcgacgatggcaccgagcgtttactggagcttgccgagaaatatcgcggcagcaaaaccgacgacaccgccaacgcccagcaggcggagtggcgctcgtgggaagtgaataaacgtctggaatactcgctggtcaaaggcattaccgagtttatcgagcaggataccgaagaagcccgccagcaggctacgcgcccgattgaagtgattgaaggcccgttgatggacggcatgaatgtggtcggcgacctgtttggcgaagggaaaatgttcctgccacaggtggtcaaatcggcgcgcgtcatgaaacaggcggtggcctacctcgaaccgtttattgaagccagcaaagagcagggcaaaaccaacggcaagatggtgatcgccaccgtgaagggcgacgtccacgacatcggtaaaaatatcgttggtgtggtgctgcaatgtaacaactacgaaattgtcgatctcggcgttatggtgcctgcggaaaaaattctccgtaccgctaaagaagtgaatgctgatctgattggcctttcggggcttatcacgccgtcgctggacgagatggttaacgtggcgaaagagatggagcgtcagggcttcactattccgttactgattggcggcgcgacgacctcaaaagcgcacacggcggtgaaaatcgagcagaactacagcggcccgacggtgtatgtgcagaatgcctcgcgtaccgttggtgtggtggcggcgctgctttccgatacccagcgtgatgattttgtcgctcgtacccgcaaggagtacgaaaccgtacgtattcagcacgggcgcaagaaaccgcgcacaccaccggtcacgctggaagcggcgcgcgataacgatttcgcttttgactggcaggcttacacgccgccggtggcgcaccgtctcggcgtgcaggaagtcgaagccagcatcgaaacgctgcgtaattacatcgactggacaccgttctttatgacctggtcgctggccgggaagtatccgcgcattctggaagatgaagtggtgggcgttgaggcgcagcggctgtttaaagacgccaacgacatgctggataaattaagcgccgagaaaacgctgaatccgcgtggcgtggtgggcctgttcccggcaaaccgtgtgggcgatgacattgaaatctaccgtgacgaaacgcgtacccatgtgatcaacgtcagccaccatctgcgtcaacagaccgaaaaaacaggcttcgctaactactgtctcgctgacttcgttgcgccgaagctttctggtaaagcagattacatcggcgcatttgccgtgactggcgggctggaagaggacgcactggctgatgcctttgaagcgcagcacgatgattacaacaaaatcatggtgaaagcgcttgccgaccgtttagccgaagcctttgcggagtatctccatgagcgtgtgcgtaaagtctactggggctatgcgccgaacgagaacctcagcaacgaagagctgatccgcgaaaactaccagggcatccgtccggcaccgggctatccggcctgcccggaacatacggaaaaagccaccatctgggagctgctggaagtggaaaaacacactggcatgaaactcacagaatctttcgccatgtggcccggtgcatcggtttcgggttggtacttcagccacccggacagcaagtactacgctgtagcacaaattcagcgcgatcaggttgaagattatgcccgccgtaaaggtatgagcgttaccgaagttgagcgctggctggcaccgaatctggggtatgacgcggactgattcacaaatctgtcacttttccttacaacaaacagggcgctcaatgagtgccctgtctctttattaatatgaaacacttatactggaaacaggctggaataatcttagccggaaaaacgaatgtcaaaaggcacagtaaagatgccagtcagcgtgtttccggtcctttggtcattcaattgcttcaggaacatataacgataaggagaacctgaactcgtgttaacgctgcttcacctgctttctgccgtcgccctgctggtctgggggactcatattgttcgaaccggcgtaatgcgcgtcttcggcgcgcgtttgcgtactgtccttagccggagcgtcgaaaaaaagccgctcgccttttgcgcggggatcggcgttaccgcactggtacagagcagtaatgccaccaccatgctggtgacctcgtttgtcgctcaggatctggtagccctcgcaccggctctggtcattgtgctgggtgcagatgtcgggacggcgctaatggcgcgtattctcaccttcgacttatcctggctgtcaccgttacttatttttatcggcgtgatttttttcctcggacgcaaacagtcacgcgccgggcaactgggccgcgtcggtattggtcttgggctgattttgctagcgctggagttgattgtgcaggccgtaacgccgatcacccaggcaaacggcgttcaggtgatctttgcctcgctgaccggcgatattctgctggatgcgctgattggcgcgatgttcgccattatcagctactccagccttgctgctgtactgctgaccgcgactctgaccgccgcaggcattatctccttccccgtggcgctctgtctggtgattggtgctaacctcggttccggtctgctggcaatgctcaacaacagtgccgccaatgccgcagcccgccgtgtcgcgctgggtagtctgctgtttaagctggtgggtagcctgattatcctgccgtttgtccatttgctggcagagacaatggggaagttgtcattgccaaaagcggaactggtgatctatttccacgtcttctacaaccttgtacgttgcctggtcatgctgccatttgttgacccgatggcacggttttgcaaaacgattattcgcgatgaaccggaactggatacccagctacggcctaaacatctggatgtcagcgcgctggatacgcccacgcttgctctggcgaacgccgcgcgcgaaaccctgcgcattggcgacgccatggaacagatgatggaagggttgaataaagtgatgcacggtgagccacggcaggagaaagagctgcgtaagctggcagatgatatcaacgttctctacaccgccattaagctgtatctggcgcggatgccaaaagaagagctggcggaggaagagtcgcgccgctgggcagagatcatcgaaatgtcgctcaaccttgaacaggcctccgatatcgtcgagcgcatgggcagcgaaattgctgacaaatcactggcagcacggcgggcattttcgcttgatgggttgaaggaactggatgcgctctatgagcaattgctcagtaatttaaagctggcaatgtcggtgttcttctctggcgatgtcaccagcgctcgtcgtttgcgtcgcagcaaacatcgttttcgcattcttaatcgccgctattcccacgcccacgtcgatcgcctgcatcagcaaaacgtgcagagcattgaaaccagttcgctacatttaggcttactgggagatatgcagcgcctgaactcgctgttttgttcggtggcttacagtgtgctggaacagccggatgaagatgaaggacgggacgagtattaatattgtgaatcctgtaggcctgataagacgcgtcaagcgtcgcatcaggcactatgaacaagatgccggatcatgcatccggcaattcacttaaaaacggtgaccagcttccagcggaaccgcttcttcaccagccttaaacacataagtggtgttcgggccacccagcgtagcgtgacctttactcactgtgatccagttaccttccggtagaccaataatcgtcagttctggcgcgacgaccagcagttcgcgaatacgctgctcacgggtttcacctttatggccttccggcagcgcgttggtgaagtgcgggttgatttgcagcgggaacagatttagcgcatcgaaaccttgcggatcgacaatcggcatatcgttggtggtacgaatagttgggcaagcaaggttagcgcctgcgctccagccaatatacagagcgccacgtttaaccacgtcagtaattggtgccagcagcccgcgctcgcggcactgtttcagcaactggaaagtattcccgccgccgacaatcacgatctcagcattttcaatcgcggcaacgggatcgacaacgctatgaataccggtgacagaaacacccagcggagcgagaaccgcagccgttttcgctgtgtaatcatcccaggtctgcgttacgccagcgaaagggataaacaccgctgagcggcgaccctgcaactgttcagcaattagcggcagtgcatgttccagccaggctttacccggcagcgtcgagttactcaataaaagcagttccattacttctccggttagtaagaaatcacgggaggcatgctaccactgcgaatttaaccacttactgacatggctcacgatgtcgcacattgcttctggaaagtgatttgagcaggtaacgaattcaagccaatggaaataacaaatagttcgctcatgactattttttatcaacccaaaggtacggtatattccgttttttacaggagaatttatgctgcccgactcatcagtccgtttaaataaatacatcagcgaaagcggaatttgctcacgccgcgaagcggatcgctatatcgagcaaggcaatgtgttccttaatggcaagcgagccaccattggcgatcaggtgaaacccggcgacgttgtgaaagtaaacggtcagttgattgaacctcgggaagccgaagatttggtacttatcgccctgaacaagcccgttggtattgtaagcaccaccgaagatggcgagcgcgataacattgtcgatttcgttaaccacagcaaacgcgtgttcccgattggccgcctggataaagactcccaggggctgattttcctcaccaatcacggcgatctggtgaataagatcctgcgtgctggcaatgatcatgagaaagagtatctggtgacggtcgataaaccgattaccgaggagtttattcgcggcatgagtgcgggggtgccaatcctcgggacagtgaccaaaaagtgcaaagttaaaaaagaagcgccgtttgtcttccgcattaccctggtgcaggggctgaaccgtcagatccggcgcatgtgcgagcatttcggctatgaagtgaaaaagctggaacgcacgcgcatcatgaacgttagcttaagcggcattccgctgggggaatggcgcgatttaaccgacgatgagttaatcgacctctttaagctcattgaaaattcctcttccgaggtaaaacctaaagcgaaggccaaaccgaaaacagcgggcatcaaacgtccagtcgttaagatggaaaaaacggcggaaaaaggcggtcgcccggcgtccaacggtaagcgttttacctcgccggggcgtaaaaagaaggggcgctgattaacgcctcagactgatgaaaacggcccaaaagtgcccggacagtcccctcgccccttcgggaaaagggttagggtgaggggaaaattgtgttcacactgacgagtgaaaatctcaggcgttgattgtggattagcgcctgccgcgcgtcgacgtatttgctgaccagctaaatgacgcttcaggatccggtttataagcctgctttttcttcaactggcgggcttttttcgcttcagcctcacgctcaaccattaatttatcgatgtaatctttcttaatgctgttggtttcggagttggtcaatacgcgaccatgcgcaatccgcgcccgatccagcagtgttttaagttcacgctgctcgcgttcagtcatctctttttgggtaatacgggggagtgccatgatggtgccctcagtgagccagagagttcagtgtacgggaattcgtttgcgagcagaactgataatattcattttgccttctcttaactatttatctctttcgataattaattagagatgcagataaaaaaattaaaggcaattattctccgataaagacgctggttaacagagtacaggctcgtttattgatgagcatagtgacaagaaaatcaatacggcccgaaatatagcttccaggccatacagtatttactcaaacaaattactatgcagtttttgcaccacctgctcggcatcttcgccgggcaccaggaagcacaggttatggctggatgcgccataacaaatcatgcgaatgttgaacggttccagtacgccgaatacctctttgccaacgccgcaggcttttgacaggtcattgccaatcaacgcgaccagcgccagaccttcttccacctccacccgacacagtgcggaaagctccatcagcagagattgcgtcagcaacgtatcgccagtggaggttgaaccggtggtatcaagggttaatgccacgctcacttctgacgtggtgattaagtctaccgaaatattatgccgcgcgaggatgccgaaaacttccgcgaggaaaccgcgagaatgcagcatattcaggctgtgcaaagtgagcagagtctgattgcgacgaagcgccagagcgcggaacagcggcggattttcagttttattgcacaccagcgtaccacctgcgcgtgggtctttgctggagccgacaaagaccgggatatcgctgcgtactgcgggtagcaacgttgccggatgcagtacttttgcaccaaaagttgccatctctgccgcttcggcaaacgcgatttcatcaatgcgttttgctgcggaaactacgcgtggatcggtggtgtagatgcccgggacgtcggtccagatatcaacacgagatgcgtgtaaagcctccgccagcaaggctgccgtataatcgctgcctccacggccaagcgtcgttgtacgacctttattttcgctaccgataaatccctgggtgatcactaagccttcattgagacgtgggagcagctgcagcgcggccagttccgccagcgcggctatatctggctctgcacgaccaaatcggtcgttggtacgcatcactttacgtacatcaaaccactgtgcctgaacatcgcgttcgcgcaggatctcaacaaacagcagggtcgacatcagctcgccgtggctgaccagctcatctgtcagcgccggagacgttgccagcgccgccgcttctgccagaacagtaatgttctccagcagacgttcaatctcttcacggataacgttcgggtaacgcagacgttccagaatggcaaactggatgttgcggatagcgtcgagtttttcgaatcgctcgccaggttccagtccttcagctaaagcgaccagcagattagtgataccagcagaagccgagaggacaactaaacgcacgttggcatcagaaagcacaatatcagcgctgcggttcatggcgtcaaaatcagctacgctggtaccgccaaatttggagacaacaatttcagacataactacctcgtgtcaggggatccattttcagccttggcacaagggaagagcggaagacgggtgggcgcagagcgatacttcgctactattttcacccagaagtgctccaccacttgcgaaacgcccgactgcgaacgcttctggtgacaacccaggggattcagcccctgtagccgatgatgaacgtggccagccgttcaatcacctcggcgatgcaccccctcaggtgttatcacaggactggctcctccaacaccgttacttgggcaacgcgcctcttctggcctgcgctagcgcaggtagtacatttataaataaagggtgagcggggcggttgtcaacgatggggtcatgcggatttttcatccactcctggcggtcagtagttcagctaataaatgcttcactgcgctaagggtttacactcaacattacgctaacggcactaaaaccatcacatttttctgtgactggcgctacaatcttccaaagtcacaattctcaaaatcagaagagtattgctaatgaaaaacatcaatccaacgcagaccgctgcctggcaggcactacagaaacacttcgatgaaatgaaagacgttacgatcgccgatctttttgctaaagacggcgatcgtttttctaagttctccgcaaccttcgacgatcagatgctggtggattactccaaaaaccgcatcactgaagagacgctggcgaaattacaggatctggcgaaagagtgcgatctggcgggcgcgattaagtcgatgttctctggcgagaagatcaaccgcactgaaaaccgcgccgtgctgcacgtagcgctgcgtaaccgtagcaataccccgattttggttgatggcaaagacgtaatgccggaagtcaacgcggtgctggagaagatgaaaaccttctcagaagcgattatttccggtgagtggaaaggttataccggcaaagcaatcactgacgtagtgaacatcgggatcggcggttctgacctcggcccatacatggtgaccgaagctctgcgtccgtacaaaaaccacctgaacatgcactttgtttctaacgtcgatgggactcacatcgcggaagtgctgaaaaaagtaaacccggaaaccacgctgttcttggtagcatctaaaaccttcaccactcaggaaactatgaccaacgcccatagcgcgcgtgactggttcctgaaagcggcaggtgatgaaaaacacgttgcaaaacactttgcggcgctttccaccaatgccaaagccgttggcgagtttggtattgatactgccaacatgttcgagttctgggactgggttggcggccgttactctttgtggtcagcgattggcctgtcgattgttctctccatcggctttgataacttcgttgaactgctttccggcgcacacgcgatggacaagcatttctccaccacgcctgccgagaaaaacctgcctgtactgctggcgctgattggcatctggtacaacaatttctttggtgcggaaactgaagcgattctgccgtatgaccagtatatgcaccgtttcgcggcgtacttccagcagggcaatatggagtccaacggtaagtatgttgaccgtaacggtaacgttgtggattaccagactggcccgattatctggggtgaaccaggcactaacggtcagcacgcgttctaccagctgatccaccagggaaccaaaatggtaccgtgcgatttcatcgctccggctatcacccataacccgctctctgatcatcaccagaaactgctgtctaacttcttcgcccagaccgaagcgctggcgtttggtaaatcccgcgaagtggttgagcaggaatatcgtgatcagggtaaagatccggcaacgcttgactacgtggtgccgttcaaagtattcgaaggtaaccgcccgaccaactccatcctgctgcgtgaaatcactccgttcagcctgggtgcgttgattgcgctgtatgagcacaaaatctttactcagggcgtgatcctgaacatcttcaccttcgaccagtggggcgtggaactgggtaaacagctggcgaaccgtattctgccagagctgaaagatgataaagaaatcagcagccacgatagctcgaccaatggtctgattaaccgctataaagcgtggcgcggttaatcatcgtcgatatgtaggccggataaggcgttcacgccgcatccggcaaccgatgcctgatgcgacgcggtcgcgtcttatcaggcctacaggtcgatgccgatatgtacatcgtattcggcaattaatacatagcacgattgattaaataaccttaataacaatgccgacgttatgtcggcatttttttatcagataaatccccttgtctgtaatttaacggaaatcataccgtgaggttaatcctaaaatagatttttaatcgttgtttatttcggaaaatacgcagattaattgcttttgtttttattttaagtttatgatttttattgttatttaaatataagttgaaacttatatttgatattcattccaattatcctaaaacgccatcgctaattccccgcgccgtaattcgcatgctttagttgtgtatactcgatcccgcccgaaatgtttttgggtaaatctccattcattcaatgaagggaaattgttatgaaaaaagttctgtatggcatttttgccatatctgcgcttgcggcgacttctgcgtgggctgcacctgtacaggtgggcgaagcggcagggtcggcagcaacgtcggtttcggcggggagttcctccgcgaccagcgtcagcaccgtaagctcggcggtgggtgtcgcgcttgcggcaaccggtggcggtgatggttctaataccgggaccaccacaaccacgaccaccagtacccagtaataaagtatgtatccccaaaataattcgagtcattgcatctgtggctagaagtatgaagggattaaccataaccacactccggtgtggttattctgcccctctggagaagagtcgtgaagcgacctgcactcattcttatctgcctgttattacaggcctgttcagccacgactaaagagctgggcaattcactgtgggacagtctgttcggcacgccaggcgtacagctgacggatgatgatattcaaaatatgccctacgccagccagtacatgcagcttaatggcgggccgcagttatttgtggtgctggccttcgctgaagacggacaacaaaaatgggtcactcaggatcaggctactctcgttacccaacatggccgtctggtgaagactctgctcggcggcgacaacctgattgaagtgaataaccttgctgccgacccgctgattaaacccgcacaaatcgttgatggcgcaagctggacgcgcacgatgggctggaccgagtaccagcaggtacgctacgccaccgcacgctcagtcttcaaatgggatggcaccgataccgtcaaagtcggcagcgatgaaaccccggttcgcgtgctggacgaagaagtctccaccgaccaggcgcgctggcataaccgctattggatcgacagcgaagggcaaattcgccagtcggaacagtatctcggcgcggattattttccggtgaaaaccactctcatcaaggcggcaaaacaatgattaaacaaactattgtcgcgttgcttttgagtgtgggagcgtcatcggtcttcgcggcaggaaccgtcaaggtgttcagcaatggcagcagtgaggccaaaacgctaacgggcgcagagcatttaatcgatctggtaggccaaccgcggctggcaaacagctggtggcccggtgcggtgattagcgaagagctggcaacggcggcagcattgcgtcagcagcaggcgttgctgacacggctggcagaacagggcgcagattccagcgccgacgatgccgctgcgattaacgccttacgccagcaaattcaggcgttgaaagtgacgggcaggcaaaaaatcaatcttgatcccgatatcgtccgcgttgccgaacgcggtaacccgccgttgcagggcaactacacgctgtgggtcggaccaccgccgtccacggtcacgttgttcgggcttatcagccgtcctggcaagcagccattcactccaggtcgcgacgtggcgagctatctctctgaccagagcctgctcagcggtgcggatcgcagctacgcgtgggtggtttacccggacggacgcacgcaaaaagcgccggtggcttactggaacaagcgtcacgtagagccgatgcccggcagcattatttatgttggcctcgcggactccgtctggagtgagacgcctgatgcccttaacgccgacattcttcagactctgacgcagcggatacctcaataatgaaaaaaagacatctgcttagcttactggcgctgggcattagcacagcttgctacggcgaaacatatcctgcgcccattggtccgtcgcagtcggatttcggtggcgtaggattattacaaacgcccaccgcgcgtatggcacgggaaggggagttgagtctgaactatcgcgataacgatcagtaccgttattactcagcttcagtgcaactcttcccgtggctggaaacaacgctgcgctacaccgacgtgcgcacccggcagtacagcagcgtcgaagcgttctctggcgatcaaacgtataaagataaagccttcgatctcaaactgcgtttgtgggaagagagttactggctgccgcaagtggcggttggtgcgcgggatatcggcggtacggggctgtttgatgcggaatatcttgttgccagcaaagcctgggggccgttcgattttacgctcggcctgggctgggggtatttgggcaccagcggtaatgtgaaaaatccgctctgttcagccagtgataaatattgctatcgcgataacagctacaaacaggcgggatctatcgacggtagccagatgttccacggtcctgcctcactgtttggcggcgtggaataccagacgccctggcaaccgctgcgcctgaaactggagtatgaaggcaataattatcagcaggattttgccgggaagctggagcaaaaaagtaagtttaacgtcggtgcgatttatcgcgttaccgattgggccgacgttaaccttagctatgaacgtggcaacacctttatgtttggcgttacgttgcgcaccaactttaacgatctgcgcccgtcttacaacgataacgcccgcccgcaatatcaaccgcagccgcaggatgccattttgcagcattcggtggtggcgaatcagttaacgctgttgaaatacaatgccggacttgccgatccacagatccaggcgaaaggcgatacgctgtatgttaccggcgagcaggtgaaatatcgtgattcgcgcgaagggatcatccgtgcgaatcggatcgtgatgaacgatctgccggatgggatcaaaacgatccgcattacggaaaatcgccttaacatgccgcaggtgacgacggaaaccgatgtcgccagcctgaaaaatcatctcgccggagagccgttgggccacgaaacgacgctggcgcaaaaacgcgtcgagccagtggttccgcagtccaccgagcagggctggtatatcgacaaatcacgctttgatttccatatcgatccggtgctgaaccagtcggtcggtggcccggaaaacttttacatgtatcagctgggcgtgatgggaacggcagatttgtggctgacggaccatctgctgaccaccggcagcctgtttgcaaatcttgccaacaactacgacaagtttaactacactaatcctccgcaggactcgcacttaccgcgcgtgcgtacccatgtgcgcgagtatgtgcagaacgatgtctatgtgaataacctgcaagccaactacttccagcatctgggcaacggcttctacggtcaggtctacggtggttatctcgaaaccatgtttggcggtgcgggggcagaagtgttgtatcgcccgctggacagcaactgggcgtttggtctggatgccaactacgttaaacagcgcgactggcgtagtgcaaaagatatgatgaaattcaccgactacagcgtgaaaaccggacatctgaccgcctactggacgccatctttcgctcaggatgtgttagttaaagccagcgtcgggcagtatctggcaggggataaaggcggcacgctggagatcgccaaacgctttgatagcggcgtggtggtgggtggctatgccacgatcactaatgtttcgaaagaggagtacggcgaaggggacttcaccaaaggcgtgtatgtctcggtaccgttggatctcttctcgtctggcccgacacgcagccgtgcggcgattggctggacgccgctgacgcgtgacggtggtcagcaacttgggcgtaagttccagttgtatgacatgaccagcgaccgtagcgtcaatttccgctaagtcatgggaaaggtgccagttttcgcactcactggcaccttcattcttaatggcctgtcgagccatcaggaacgcagttcactcccggtttgcgatctggtgtgtaaaggcgaaaacattctgtcttcctgtccgtcgatatcggttgcaggtctggttgcctgagcgactgggccatcattgggctggagacattgctttgcggtaggtcggctttatcagcagtaccgagcggaccagcataagcaggaagaacagagactgataacatcaaagcagcaaaataaggcttcatttttaccacctttatcaggttacgtttcatttgttccagaggaacattgtcgatttttcgcgcattgctggtggctgggaatcacctgaatgggtgatttttgaattaccggctttggtgcggtttgtcttgccggatgcgccgccaggcgcggcttatccggcctacgggtaggtatatccggctttggtggaggcgcgctccaaatccaggttgaacaaaacatacacaaaaaatatagatctccgtcacatttttgcgttatacaggaagctcgccactgtgaaggaggtactgctatgacgtcactctctcgtccgcgcgtggagtttatctccaccattttgcagaccgtactcaatcttggcctgctgtgcctcggcctgattttggttgtcttcctcggcaaagaaacggtgcatctggctgatgtgctgttcgcgccagaacaaaccagcaaatatgagctggtagaaggactggtggtttactttctctatttcgaatttatcgcgctgattgtgaagtactttcagtccggttttcacttcccgctacgttactttgtctatattgggatcaccgccattgtgcgcttgatcatcgtcgatcataaatcgccactggatgtgttgatctactcggctgcgatcctgttactggtgatcaccctgtggctgtgtaattcgaaacggctgaagcgggagtaaaaagtcagcacgccgaaatggcgcggcgtgctggacaggaagattacagcgtagcagtttgttgtgttttcttcgtttccggttcccagagcgcttccagctcctcaagggttttacctttggtttccgggacaaatttccacataaacagtgctgccagaacgcccatacaaccgtaaatccagtaggagaaaccgttgtggaaatgggccaccagccaggagtttttgtccatcatcgggaaggtccaggagacgaagtagttcgccagccactgggccgccaccgcgattgccagcgctttaccacgaatagcattcgggaagatttccgacagcagtacccagcataccggaccccaggacatggcaaaggcggcaacatagaacagcatcgacagtagcgccacaatacccggtgcctgagtgtaaaacgcggtaccgaggctaaacataccgattgccattccgagtgcgccgataatttgcagtggcttacgaccaaatttatccaccgtcataattgccagaacggtgaaggtgaggttgataactccgacaataatggtctgcaacagcgcgatatccgtgctggcccccagcgttttgaacacttccggcgcgtagtacagcaccacattgatgccgacaaattgctggaagatggagagcattacgccgattacaatcacgcccacgccaaacatcagcagacgaccaccggttttgcggccatgatccagggagtgtttaatttcctgtactgcctgagttgcaagcgtgttgcccataattttgcgcaggataccttccgcctgttcttgcttgccgcgcgacatcagccagcgaggactttctggcacggtatacagcagcattaagaacagcagtgcagggatacattccgaggcaaacatataacgccagccgtcagtattcagccagctggcatcaccggaacgggcaataaaatagtttacgcagtaaactaaaagttgcccgaaaataatcgcaaactggttaaaagagaccagtttcccgcgaatatgagctggagccagttccgcaatatacattggcgagagcattgaggctaaaccaacgccaataccgccaataatgcgataaataacaaattccgggacataacctgccagataaacaggcacagtgttgtccgggtttatagaggtaaaaccaagttctggccaggcagaacctacaccagaaataaaaaacaggacagcagcaatcttaagtgaatcacgacgaccgaagcggttactgcaataaccaccgagggcaccgccgatgatgcaaccaatcagagcgctggccacgcaaaaccctaacagggagttggcagcggattcacttaagttttgtggagcaacaaagacggtattgagtgactcaacagtaccggaaataacggcggtgtcgtagccaaataataaaccacctaatgtagcgactaaggtaatcgaaaatatataactggaattatactgggtattcattcagacctgccttagaccattctgatcttttatcagtgcattgatgttggaattgtcaggcagttaaggcaattatcattttttacaatgcgtttacgtaatgtcttttctgtgatcttaattgtgataattatccaaaattgataaaaacaatactattgccgtgactcagagcacgaaagagaattatcgtaagtgggaaaacaaataacgtaaaaataataagctctatgatggaaatattaaccggcgaacgattcagattgcagacgaaagaaaaaaaggcgctccgtggagcgccgaataacagtcacaagttgggataacgtaagttgagggtgcagcggcataacattggcagaacaacatctttaacctttcacaccacctgccgtcaggccgttgaccagccagcgttgagccagcaagaagacgatggtgatcggtaatgcagacatcacggcagcggcggcaaagtcaccccacaggtagttttgcgggttgaggtattgctgcatccccacggccagggtgtagctgtttacgtcacgcagtaacagcgacgcgaccggaacttcagtaatggcagcgataaacgacaggatgaataccaccgccagaatcggtactgacagcggcaacaggacaaggcggaaggcctgccacggtgtcgcaccatccagcgcagcagcttcttccagcgaactgtcgatggtttcgaaatagcctttgatggtccagacatgcagcgcaatcccacccagatacgcgaaaattacgccgccgtgagtattcaggccaatgaatggaatgtactcacccagacgatcaaacaacgcatacaacgcgaccagtgaaagtactgccgggaacatctggaaaatcagcattcctttcagcagcgtcgctttgcctggaaagcgcatacgggcgaaagcgtaggcgcaggtggtggagagcgccacaatgccaatcgcggaaatcccggcgacctttaccgagttccacagccacagcagtaccgggaatggcggtggcgtaatgcgaccatcagcctgttcaacgctaaaacctaacgccagtttccagtgatcccaggagatttgctccgggatcaggctgccggtcgcaaagtttccctgacgcagcgagatagcgacgaccatcagcagcgggaacataatcgctgcgataaaaagtagcagtagcaggtgagtaataaataaacgagctttttgcgatttcggttggaccattgccatttttgttatctcccttaatcaaacttcattcgcgtggctttcaggttcactatcgccagcgcacccaccagcaggaagatcagcgtggcaattgctgccgccagaccgaagtcctgacccccgccgccttcaaaagcgatgcggtaggtgtagttaacaagcaggtcggtataaccggctggcgtggtcgtgccaagacgatccgggccgccgttggttaacagttgaatcagcacgaagttgttaaagttaaaggcgaagctggcgatcatcagcggcgtcagcggtttaatcagcagcggcagcgtaatcttaaagaagttctggaacggacctgcgccatccattgctgaggcttcatacaaatcgtccggaatcgctttcagcaagcccatgcagaggatcatcatgtacggataacccagccaggtattgacgataattagcatcgtgcgggcggtggtcggatcgctgaaccaggcgggcttcacgccaaacagcgcgctcaacatcatgttgatttcaccgaagctctggttaaacaaccctttgaaaatcaagattgaaatgaacgatggcaccgcgtagggcagaatcagcaggacgcgatagaccgctttgccgcgcaacgcttcccactgcaccagacacgccagaaccatgccgaccgccaccgttaaaaagacagtgatcagcgagaacaccacggtccagacgaaaatggcgaggaacggtttctgaatgccttcgtcggtaaagacgcgggtaaagtttttccagccggtggtcacggtgtaaccggggcttagcttttcatcaccccagttgccgtcggcggtaatggactggtaaaagccaatttggttattcggacgatatttcacgccgctctgattattcgtcaacgtgccgtcaccgtcgagtgtgtagagcggctgcgtgccagaaaactggcgcagggagctcatcatcactttgttgccatccggcagaatggcggtaatgtcactcagcgcctgacgattctgggtaatcacgcgcagattcgcgcgttcgccttcgggctgggcggtcgtttctttcagttgcagtttttgctcgccgccaaatttaaaagcgtcggagaggtaatttttgccggtttcgccgtcgctgagcgccagttgccactcatcgcccgccgggtaaagaccaaagttataggttttgcctgcttgccaggagcgatctaacaacacttcctgcgcacgttcaaaagtcagctggttagtgctgctgtagttggtgaaggcaatggcgatggtgcagaccagagggaagaggacgaataatcccattccagccattcccgggtaaacatagcgccaggcgtaggctttacgattggcgaaaatatacagccccgctgaactcaatatcagcgtggtaatggcgaacaggtattccccttgtgcgtacattaaaacaacaaggtaacccaccagcaggccgagcagacctagcactgaccatttcagcgcgtcgctttgccaccaatgtttctttttaatgacatccatggggttcttcctcattccaggacggataaggctttcacgccttatccgacaacaactgcctgatgcgacgctgacgcgtcttatcaggcctacatacgtttcggttttgtaggccggacaaggcgttcacgccgcatccggcatttcacagcattacttggtgatacgagtctgcgcgtctttcagggcttcatcgacagtctgacgaccgctggcggcgttgatcaccgcagtacgcacggcataccagaaagcggacatctgcgggatgttcggcatgatttcacctttctgggcgttttccatggtggcggcaatacgtggatctttcgccaactcttcctcgtaagacttcagcgctacggcacccagcggtttgtctttattaaccgcttccagaccttcatcagtcagcagatagttttcgaggaactctttcgccagctctttgttcggactggcggcgttaatacctgcgctcagcacgccaacgaacggtttggatggttgacccttgaaggtcggcagtaccgttacaccataattcactttgctggtgtcgatgttggaccatgcccacgggccgttgatggtcatcgctgtttcgcctttattaaaggcagcttctgcgatggagtaatcggtgtctgcattcatgtgtttgtttttaatcaggtcaaccaggaaggtcagacccgctttcgcgccagcgttatccacgcccacgtctttaatgtcgtacttgccgttttcatacttgaacgcataacccccgtcagcagcaatcagcggccaggtgaagtacggttcttgcaggttgaacatcagcgcgctcttacctttcgctttcagttctttatccagcgccgggatctcttcccaggtttttggcgggttcggcagcagatctttgttataaatcagcgataacgcttcaacagcgatcgggtaagcaatcagcttgccgttgtaacgtacggcatcccaggtaaacggatacagcttgtcctggaacgctttgtccggggtgatttcagccaacaggccagattgagcgtagccaccaaagcggtcgtgtgcccagaagataatgtcagggccatcgccagttgccgcaacctgtgggaatttctcttccagtttatccggatgctcaacggtgactttaattccggtatctttctcgaatttcttaccgacttcagcgagaccgttatagcctttatcgccgttaatccagattaccagtttaccttcttcgattttggcgagagccgaggcggaaaacatcatcgtcgttaatgcggataatgcgaggatgcgtgcacctgtttttattttcataatctatggtccttgttggtgaagtgctcgtgaaaacacctaaacggactctagtttctttatacggcaacctctttccatcctccttgcccctacgccccaccgtcgctttgtgtgatctctgttacagaattggcggtaatgtggagatgcgcacataaaatcgccacgatttttgcaagcaacatcacgaaattccttacatgacctcggtttagttcacagaagccgtgttctcatcctcccgcctcctcccccataaaaaagccagggggtggaggatttaagccatctcctgatgacgcatagtcagcccatcatgaatgttgctgtcgatgacaggttgttacaaagggagaagggcatggcgagcgtacagctgcaaaatgtaacgaaagcctggggcgaggtcgtggtatcgaaagatatcaatctcgatatccatgaaggtgaattcgtggtgtttgtcggaccgtctggctgcggtaaatcgactttactgcgcatgattgccgggcttgagacgatcaccagcggcgacctgttcatcggtgagaaacggatgaatgacactccgccagcagaacgcggcgttggtatggtgtttcagtcttacgcgctctatccccacctgtcagtagcagaaaacatgtcatttggcctgaaactggctggcgcaaaaaaagaggtgattaaccaacgcgttaaccaggtggcggaagtgctacaactggcgcatttgctggatcgcaaaccgaaagcgctctccggtggtcagcgtcagcgtgtggcgattggccgtacgctggtggccgagccaagcgtatttttgctcgatgaaccgctctccaacctcgatgctgcactgcgtgtgcaaatgcgtatcgaaatctcccgtctgcataaacgcctgggccgcacaatgatttacgtcacccacgatcaggtcgaagcgatgacgctggccgacaaaatcgtggtgctggacgccggtcgcgtggcgcaggttgggaaaccgctggagctgtaccactatccggcagaccgttttgtcgccggatttatcggttcgccaaagatgaacttcctgccggtaaaagtgaccgccaccgcaatcgatcaagtgcaggtggagctgccgatgccaaatcgtcagcaagtctggctgccagttgaaagccgtgatgtccaggttggagccaatatgtcgctgggtattcgcccggaacatctactgccgagtgatatcgctgacgtcatccttgagggtgaagttcaggtcgtcgagcaactcggcaacgaaactcaaatccatatccagatcccttccattcgtcaaaacctggtgtaccgccagaacgacgtggtgttggtagaagaaggtgccacattcgctatcggcctgccgccagagcgttgccatctgttccgtgaggatggcactgcatgtcgtcgactgcataaggagccgggcgtttaagcaccccacaaaacacacaaagcctgtcacaggtgatgtgaaaaaagaaaagcaatgactcaggagatagaatgatgattactctgcgcaaacttcctctggcggttgccgtcgcagcgggcgtaatgtctgctcaggcaatggctgttgatttccacggctatgcacgttccggtattggttggacaggtagcggcggtgaacaacagtgtttccagactaccggtgctcaaagtaaataccgtcttggcaacgaatgtgaaacttatgctgaattaaaattgggtcaggaagtgtggaaagagggcgataagagcttctatttcgacactaacgtggcctattccgtcgcacaacagaatgactgggaagctaccgatccggccttccgtgaagcaaacgtgcagggtaaaaacctgatcgaatggctgccaggctccaccatctgggcaggtaagcgcttctaccaacgtcatgacgttcatatgatcgacttctactactgggatatttctggtcctggtgccggtctggaaaacatcgatgttggcttcggtaaactctctctggcagcaacccgctcctctgaagctggtggttcttcctctttcgccagcaacaatatttatgactataccaacgaaaccgcgaacgacgttttcgatgtgcgtttagcgcagatggaaatcaacccgggcggcacattagaactgggtgtcgactacggtcgtgccaacttgcgtgataactatcgtctggttgatggcgcatcgaaagacggctggttattcactgctgaacatactcagagtgtcctgaagggctttaacaagtttgttgttcagtacgctactgactcgatgacctcgcagggtaaagggctgtcgcagggttctggcgttgcatttgataacgaaaaatttgcctacaatatcaacaacaacggtcacatgctgcgtatcctcgaccacggtgcgatctccatgggcgacaactgggacatgatgtacgtgggtatgtaccaggatatcaactgggataacgacaacggcaccaagtggtggaccgtcggtattcgcccgatgtacaagtggacgccaatcatgagcaccgtgatggaaatcggctacgacaacgtcgaatcccagcgcaccggcgacaagaacaatcagtacaaaattaccctcgcacaacaatggcaggctggcgacagcatctggtcacgcccggctattcgtgtcttcgcaacctacgccaagtgggatgagaaatggggttacgactacaccggtaacgctgataacaacgcgaacttcggcaaagccgttcctgctgatttcaacggcggcagcttcggtcgtggcgacagcgacgagtggaccttcggtgcccagatggaaatctggtggtaatagcaaaacctgggccggataaggcgtttacgccgcattcggcaaccaacgcctgatgcgacgcttgcgcgtcttatcaggcctacaacggctgtcaaatgtaggccggataaggcgtttacgccgcatccggcataaaaacaggttgtcattatctgaaaggggcgaaagcccctctgattatcgggtttagcgcgctattgcctggctaccgctgagctccagattttgaggtgaaaacaatgaaaatgaataaaagtctcatcgtcctctgtttatcagcagggttactggcaagcgcgcctggaattagccttgccgatgttaactacgtaccgcaaaacaccagcgacgcgccagccattccatctgctgcgctgcaacaactcacctggacaccggtcgatcaatctaaaacccagaccacccaactggcgaccggcggccaacaactgaacgttcccggcatcagtggtccggttgctgcgtacagcgtcccggcaaacattggcgaactgaccctgacgctgaccagcgaagtgaacaaacaaaccagcgtttttgcgccgaacgtgctgattcttgatcagaacatgaccccatcagccttcttccccagcagttatttcacctaccaggaaccaggcgtgatgagtgcagatcggctggaaggcgttatgcgcctgacaccggcgttggggcagcaaaaactttatgttctggtctttaccacggaaaaagatctccagcagacgacccaactgctcgacccggctaaagcctatgccaagggcgtcggtaactcgatcccggatatccccgatccggttgctcgtcataccaccgatggcttactgaaactgaaagtgaaaacgaactccagctccagcgtgttggtaggacctttatttggttcttccgctccagctccggttacggtaggtaacacggcggcaccagctgtggctgcacccgctccggcaccggtgaagaaaagcgagccgatgctcaacgacacggaaagttattttaataccgcgatcaaaaacgctgtcgcgaaaggtgatgttgataaggcgttaaaactgcttgatgaagctgaacgcctgggatcgacatctgcccgttccacctttatcagcagtgtaaaaggcaaggggtaattacgccccacagtgctgattttgcaacaactggtgcgtctcctggcgcacctttttttatgcttccttcctgggatatgagcgattttttatagtaactcacttcttcttcactaagaatatccattatctcaatgccttatcagagattcttttcctttcgccggtagtgtctggacattcaggctacttttccaggttattttatttctgttatgcagaggttttatgataagtcatatcctaaattctggcggcaataactctttgatgaaacatgatgtggtgcaaggaaataatatagtagatcttgatttactacgtaatttaaatggggtgccaggtttaaacagagataactttatttatatcagcaatattttttcaaatataaaacaacggaacgaaaaaatcatgcaataaatatgtttcgtgaagtctcaatcagtaatgatactataagtgtaaaattctacagaaatgaaaaaaattgaatgcgcttgcaattttctgatggataaagatgcgcaggggtatatcgacctgtctgatttggatttaacaagttgtcattttaaaggtgacgttatatcgaaggtgtcttttttatcatcaaatctacaacatgtaacattcgaatgtaaagaaattggggattgcaattttactactgcaatagttgataatgtcatatttagatgtcgacgtttacacaatgtgatttttatcaaagcgagtggtgaatgtgtcgatttcagcaaaaatattcttgatacagttgacttctcgcagagtcaacttggtcatagtaattttcgcgaatgtcagattagaaattcaaacttcgataattgttatctttacgcttcgcacttcaccagagcagagtttctgtctgccaaagaaatatcatttattaaatcgaatttgacagctgttatgtttgattatgtgcgaatgtcgacagggaattttaaagattgcattacagaacaattggaattaactattgattattcagatatattttggaatgaagatctcgatggttatatcaataacattataaaaatgattgatacattgccagataatgcaatgatattgaaatccgttctggccgtaaaactggtgatgcaattaaaaatacttaatattgttaataaaaactttattgagaatatgaagaaaatatttagccattgtccttatataaaagatcccattatacgcagttatatccattctgatgaagataacaagttcgatgattttatgcgtcaacatcgattcagtgaggtgaatttcgatacccaacagatgatcgattttattaacagatttaatacgaataaatggctaattgataaaaataacaatttttttatccaacttatcgatcaggccttacgatcaacggatgatatgatcaaagcaaatgtttggcatctttataaagagtggattcgtagtgatgatgtttcacctatatttatagaaactgaagataatttaagaacctttaacacgaatgaattaacacgaaacgataatatctttatcctgttctcctcagtcgatgatgggccagttatggtggtaagctcccagcgcttacatgatatgttgaatcctacaaaagataccaattggaattccacgtatatctacaaatccagacatgagatgttgcctgttaatcttactcaggaaacacttttcagctccaaatctcatggtaaatatgcgcttttccccatttttactgcgagttggcgagctcatcgtataatgaataagggtgtttaagtaaaggaaaacatcaccgttcctggcatcctggacggtgatgcccctacggttgccctcgccagcacgggcatcggtaaagcgtaaggttcaacatcgttttaccacttcatgcgattgttgcgtttttgttgcgtattagatcacttaatttgctttacatctcccgtaaacacttttctgcgatacaatgcctttacgttatgtaacggagagttcggcatgtcacaccccgcgttaacgcaactgcgtgcgctgcgctattgtaaagagatccctgccctggatccgcaactgctcgactggctgttgctggaggattccatgacaaaacgttttgaacagcagggaaaaacggtaagcgtgacgatgatccgcgaagggtttgtcgagcagaatgaaatccccgaagaactgccgctgctgccgaaagagtctcgttactggttacgtgaaattttgttatgtgccgatggtgaaccgtggcttgccggtcgtaccgtcgttcctgtgtcaacgttaagcgggccggagctggcgttacaaaaattgggtaaaacgccgttaggacgctatctgttcacatcatcgacattaacccgggactttattgagataggccgtgatgccgggctgtgggggcgacgttcccgcctgcgattaagcggtaaaccgctgttgctaacagaactgtttttaccggcgtcaccgttgtactaagaggaaaaaaatatggagtggagtctgacgcagaataagctgctggcgtttcatcgcttaatgcgtacggataagccaattggcgcgttactgctgctctggccaacattatgggcgttgtgggtggcgacaccgggcgttccccagctctggatcctggcggtgtttgtcgcgggtgtctggctgatgcgcgctgccggatgtgtggtgaatgattatgctgaccgcaagtttgatggtcatgttaagcgcacggcgaaccgaccacttcccagcggcgcggtaacagagaaagaggcgcgcgcgctgtttgtcgtgctggtactgatttcgtttttactggtgctgacgctgaatacgatgaccattctgttgtcgattgccgcgctagcgctggcgtgggtgtacccgtttatgaagcggtatacccatctaccgcaagtggtgctgggcgcggcgtttggctggtcgattccaatggcttttgccgctgtgagtgagtcggtgccattgagttgctggttaatgttcctcgccaatattctctgggcggtggcttacgacacgcagtatgcgatggttgaccgcgatgatgatgtgaagattggcattaaatccacggcaatcctgttcggccaatacgataaattgattattggtattttgcagattggcgtactggcactgatggcgatcatcggtgagttaaatggcttaggctggggatattactggtcaattctggtggctggcgcgctgtttgtttatcaacaaaaactgattgccaaccgcgagcgtgaagcctgctttaaagcatttatgaataataactatgttggtctggtactatttttagggctggcaatgagttactggcatttctgatgatgtaaaaaagccggatgatcatccggctttcttctgggttgcctgatgcgcggcgcttctcaggcctacacaacacatcgcaatttattgaatttgcagattatggaaggccggataaggcgttttcgccgcatccggcaattctctctgattacccttcgccctgcgtcgcactctcaatcgtcaaacgcacgtctgatgtaatcaactccgccagcaactgataaaccttcatcgtttctgccggttcggcatcgccgctatcgctgatatacccttcatcacgcagtgtcagcaccagagaactgaacaccgccttgtcgaagaactccggcgcgttgatgccgtgcagcacggagagacgttgcgcgacggtgcggctctctttctccagcgtaccgcggttgatcgacgggttggcactcaacaaccagaaggtgatggcataacgttgcagcgtttcgcgcgcgcctgcggccagcagctgtagcgtgcgagaatgcgccgggttgatatgcaactcatcatcttgcagggtaatcagcccctgacgttgcatctcatttgccagcgcatcaataacgtccggcaactcgtcgcgatcccagcgcaggaacagctccgctttcagcattgggtaaagcacattgacgtgctccatcaatacgtcgcgggagatgtggcgatgctgggtgacgattgccgccatcagcgaaggcagcaccaacatatgcgcaatgttgttgcgatagtaggtcatcagcaccgcttgctcgcgcggcagaatgatgatgtcgccgattgtgtctttctcgacttcaaacttgttcatttgcagcgcgtgatcgataagctcgctggcgctggctgaaggaacggtagagtccgtggagtagggcacgttgcgcatcagatccaggtagcagttgagttgctcggttaactgctcgcgggtgagtgagcgctgacgtgatgccagtagcgcagtacagcacaggttcatggcgtttgccgcgcctgcgttgttaatgcgtaccatcagatcggcagcaatattattgaccgtcggcgttaaccatgccggacgcaccgcttcgatgggatcgatagattcacgccagtcaggtacatgctggttaaggtaggtcatcaacggcattggttcaccgaagttgacgtaaccctgaccgagattacgcagcttgcttaaaccgcgcagcatctgcggcaggctctctttctctttcgtcgcgccgcgcagttctttggcgtaagtacccacttccatgacgtgctcataaccgatatagatcggaatcagcgtaatcggacgcgtgccgccacgcagcatcgcctgaatggtcatcgacagcgtaccagttttcggatccagcaaacgccccgtacgggaacgaccgccttccacgaagtactcgacggaataaccacggctgaacagttcgccgagatactcccggaaaacggtggaataaagtttattgcctttaaacgtacggcgaataaagaacgcccccagacggcggaaaatcggcccggcaggccagaaattcaggttgatcccggcggcgatatgcggcggcaccagcccctggtgatacagcacgtaagaaagcagcaggtagtccatgtgactgcggtggcaaggcacatataccagctcatgaccgtcgtgggccagctggcgaacgcgctcagcgttatggacgttgatgccctggtaaagtcggttccaggtgaagcccagaatacggtcagtcaggcgaatcatctcgtaagagaaattcgccgcaatctcttccatcagtgcaatcgcgttctgctgcgctttttcatgggagatttttttgctgcgcgcttcatcttctaccgctttggcaatggcgcgggaggcgagcagcttattaaacagatcctgacgagcaggcaaacgtgggcctacggcagccagacgttgacgggcaaagtgcatacgcgccacgcgcgccagtttctgagcgatagttttatccgtgccgtgttcatccgccatacggcgcagcgaaactgacggcgagaaacgcacaaaactgtcgcgaccgagccacagtacagcgaaaaatttctgtacgccgttaagcatacgcagcggcgggttcacttcgcctttttcacgccccggcgcgcgaccaaacatcaccgacactggcaccatctgcacatccagatttgggttgctacggtgcaaatcgagatagtcgtggaacagcttaatagactcttctttcggcgtgtaataggtgaacacacgcggcccgccgtgaatgaacacatagcgcggcagtagcgtgccgtcgatttccagcggctctaacgggtcaggcaagtcatgtgccagacactgggcgcgcaacgtcagcaaatctgctttcgagttgtacggtaaaacgtacataattggacgagaggtatccagccccagttccggggcaggatctgccggaatagacttgctttttaccaggatgcttaatggtaaattcagtaatttgtagtaaattcgtggccagccggacataaacgatgtaaagcctctggttaataatgcaaatgcgcggcaaggatagcagaaagtcatgggaaattctgtggtatccgctcatgtttcgcgcggcgctacgcaaacccgaatcatcggatttaacggtacactgatattgacgctcataatgtaaaaaggttctttcaatggccaataataccactggattcacccgaattatcaaagctgctggctattcctggaaaggtttacgcgctgcatggatcaacgaagcggcattccgtcaggaaggcgtagcggtattgttggcggtggtcatcgcctgctggctggatgtggacgcgattacccgcgtgctgcttatcagctccgtgatgctggtgatgattgtggaaatcctcaatagcgccatcgaagcagtggttgaccgaattggctctgaataccatgagctttccggacgcgcaaaagatatgggatccgctgcggtgctgattgccattatcgtcgccgtgattacctggtgcattctgttatggtcgcattttggataacccttccagaattcgataaatctctggtttattgtgcagtttatggttccaaaatcgccttttgctgtatatactcacagcataactgtatatacacccagggggcggaatgaaagcgttaacggccaggcaacaagaggtgtttgatctcatccgtgatcacatcagccagacaggtatgccgccgacgcgtgcggaaatcgcgcagcgtttggggttccgttccccaaacgcggctgaagaacatctgaaggcgctggcacgcaaaggcgttattgaaattgtttccggcgcatcacgcgggattcgtctgttgcaggaagaggaagaagggttgccgctggtaggtcgtgtggctgccggtgaaccacttctggcgcaacagcatattgaaggtcattatcaggtcgatccttccttattcaagccgaatgctgatttcctgctgcgcgtcagcgggatgtcgatgaaagatatcggcattatggatggtgacttgctggcagtgcataaaactcaggatgtacgtaacggtcaggtcgttgtcgcacgtattgatgacgaagttaccgttaagcgcctgaaaaaacagggcaataaagtcgaactgttgccagaaaatagcgagtttaaaccaattgtcgttgaccttcgtcagcagagcttcaccattgaagggctggcggttggggttattcgcaacggcgactggctgtaacatatctctgagaccgcgatgccgcctggcgtcgcggtttgtttttcatctctcttcatcaggcttgtctgcatggcattcctcacttcatctgataaagcactctggcatctcgccttacccatgattttctccaatatcaccgttccgttgctgggactggtcgatacggcggtaattggtcatcttgatagcccggtttatttgggcggcgtggcggttggtgcaacggcgaccagctttctctttatgctgttgctgtttttacgcatgagcaccaccgggctgactgcgcaggcttatggtgccaaaaatcctcaggcattagcccgtacgctggtgcaaccgttgctgttggcgttgggggctggggcgttaattgcgctgctgcgtacgccgattatcgatctggcgctgcatattgttggcggtagtgaggcagtcctggaacaggcgcggcgctttcttgaaatccgctggttaagcgcaccggcgtcgctggcgaatctggtattactcggttggttactcggcgtgcaatatgcccgtgcgccagtaattttgttagtggtcggcaatatcctcaacattgtgctggatgtctggctggtgatggggctgcatatgaacgtgcagggcgcggcgctggcgacggttattgcggaatatgcaacattgctgattggtctgctaatggtgcgtaaaatcctcaaactacgcggaatttccggcgaaatgctgaaaactgcctggcgaggaaacttccgtcgcttgctggcgcttaaccgcgatatcatgctgcgttcgctgttgttgcaactctgtttcggcgcgatcaccgtacttggcgcgcgactggggagtgacattatcgctgttaacgcggttctgatgacgctactcacctttaccgcctatgcgctggatggttttgcctacgcggttgaagcgcactccggtcaggcatacggtgcgcgcgacggtagccagttgctggatgtctggcgggcagcgtgccgccagtcggggatcgtagcgttactgttttcggtggtttatttgctggctggggaacacatcattgcgttactgacgtcgttaacccagattcagcagctggctgaccgctatcttatctggcaggtgattttgccggtggttggcgtctggtgttatctgctggacggcatgtttataggcgcaacgcgtgccaccgaaatgcgtaacagtatggcggtggccgccgcaggttttgcgctgacgctccttacgctgccgtggctgggtaatcatgctttgtggctggcattaaccgtctttctggcgttgcgcgggctttctctggcggctatctggcggcgtcactggcgcaatggtacctggtttgccgcaacgtgacggttaaaaattctgaataaataatcctaagccaaattgctgactacacttaatctcacgttcagaagaaaagtgaacgtactctcattcacaacctaacgatgaggtcttgattatgaataaagatgaagccggcggtaactggaaacagtttaaaggtaaagtgaaagagcaatggggcaaactgaccgatgatgatatgacgatcattgaaggtaaacgtgatcaactggtcggtaaaatccaggaacgttatggttatcagaaagatcaggcagaaaaagaggtcgtggattgggaaacccgcaatgaatatcgctggtaattaatccctcctgcccgacgtgtacaaggatgtacgccctcttaacgcggtttctttttcacctgcacagagtgatcatgctggcactgttcaggatgacgacacgcttccacttctacacatgccgcacagagcccatgtgcttcaatcacattatgccgcagggcaaaccccatttttgccgccagcgtatgcataatgtcttccacgccttctgcacactcttctttcactgcgccgcagcgatcgcaaataaacatggctgacgtatgggtgggctgatcgaacagatgacagagcacataactgttggtggattccaccttatgcacaaaaccttgctcaagcagaaaatccagcgcgcgataaaccgttggcggcttggcttgcggttcagcttcgcgcagtaaatcaagcagatcataagcgctgatagcgccatcctgcagactcatcaggcgcaacacttccaggcgctgtggggtcaggcgcacattacgctgcgcgcagattttttcagcctgcgctaataactcctgcgttgtggtcttttccatcgggcacctcaaagtgggggttaagaatgtccttactttaccatgttccaggaaaaacaccgagaacccttattgttgccgtaatgttgattttctgttttgtaggtaaggtgttatgttgccttgtcgtaccattatcaacacgataataattaataattcatttttaaataaattgcttcaagttaactcgctatttatttaactgggtttaaacgcatacctgtagttcagaaattatgagcgatttttgatagtgaccagatggcaaaagaattataaggaggacacggtacgacaaaaaaggtagatgaatcatgttgaagataatacccggtgcaactggatactttaataaaacactcaattcaaatcaattcgataatgaagatgcaatcaaagataaattagataatagaggttcaatcaaaggtaaattaaataatatatatggtaaatctattgattatgcagcgctgcgtcatcgggatataattattgcaaaaatagatttgtttattcaacgaatcacgcataatttatggcatgcacgtaaaaaaatgtgtttttaattgtgcaaataaatgatctcaaaatgtgggtcaataagtatattgacgattgcactgatgaggatttaaacgatcgtgactttattgcatcagttgttgaccgggctatttttcatttcgcgattaatagtatatgtaatcctggggataataaagatgcaatgcccattgaacaatgtacttttgatgtagaaactaagaatgaccttccctccacggttcagctattttatgaggaatctaaggataatgaacctttagcgaatatacattttcaagcaataggttctggttttttaacgtttgttaatgcctgccaggaacatgatgacaacagcttaaaattatttgcttcgctgttaatttcactttcatattctagtgcctacgcagatttatcagaaacagtgtatattaatgaaaataatgagagctacctgaaagctcagtttgaaaaattatctcaacgtgatatgaagaagtacctgggagagatgaagcgtctggctgatgggggagaaatgaattttgatggctatctggataagatgtcacatctggtgaatgaaggaacgctcgatcctgatattttaagcaaaatgcgagatgctgcaccacaattaattagcttcgcgaagtcgtttgacccaacctcaaaggaagagattaaaatacttacagacacttctaaattaatttatgatttgttcggggttaaatcggagaaataatatgtgaagttcttcgatagtatggaaggcattatataaaaggacccaatatttattgggttcttttttctctatcaatactattagcagggagatatatcaccagagtttaatgtgtgattttttatttatcgtcgaacctggattgtttatcattggccttaacaaagttaacggctaataagattatttccatcacttcgtgagagcttcatgccttgagaggatctcaattttcttttgcaatgagacaggcgcttcctgttgttatggtatagtaccccgctattgagcctcctgaatagtgatgctgaataacataaccccatgatatatcgataaaataatctctacatttgaaaatgcacggtaattctgaaatgcaaaaaatcaaccaaaccagcgcaatgcctgaaaaaactgacgttcactggagtggtcggtttagcgttgcaccaatgctcgactggacggacagacattgccgctatttcttgcgtctgctttcccgcaatacgttgctgtataccgaaatggtgaccacaggggcgattattcacggtaaaggtgattatctggcgtacagtgaagaagaacatccggtagcgttgcaactgggcggtagcgatccggcggcgctggcgcagtgtgcaaagctggcagaagcgcgcggatatgatgagatcaacctgaatgtcggctgcccgtctgaccgggtgcagaacggcatgtttggtgcgtgtctgatgggtaatgcgcagctggttgccgactgcgtgaaagcgatgcgcgatgtggtgtcgattccggtgacggtgaaaacgcgtattggcatcgacgaccaggacagctatgaatttctctgcgatttcatcaataccgtttccggcaaaggcgagtgtgagatgttcatcatccacgcacgtaaagcctggctttcggggttaagcccgaaagaaaaccgtgaaatcccgccgctcgattatccgcgtgtgtatcaactgaagcgtgactttccgcatctgacaatgtcgattaacggtggtatcaagtcgctggaagaggccaaagcacacctgcaacatatggatggcgtgatggtcgggcgcgaggcgtatcagaatccgggtattctggcggcggtagaccgggagatctttggttcctcggataccgatgccgatccggtggcggtagtgcgcgccatgtatccgtacattgagcgtgaactcagccaggggacgtatctcggccatattacccggcatatgttgggcttgttccagggtattcctggcgcgcggcagtggcggcgttatttaagtgaaaatgcccataaagcgggtgcagacattaatgtgctggaacacgcgctcaaactggtggcggataagcgttaacttttcaccaaaaagtagtcaaattcaccacgccctgcgcaccgtcgcggggcgttttgctgttaaatcaatagattatttttggcatgattcttgtaatgccagcaagagatttcatatttgggagagcatcatgctggaactactttttgtgattggcttttttgtcatgctgatggtcaccggcgtttcgttgctgggcattatcgccgcgctggttgtggcgacggccattatgttcctcggcggtatgctggcattgatgattaagttgctgccgtggttactactggcgattgcggtggtgtgggttattaaggcgattaaagcaccaaaagtgccgaaatatcagcgttatgaccgctggcgttactaagggattgtgcggatgatcacaacctaaggttttatccttagaacaaaataggaattgataatcaaatctgtcactattgcgcctctaacagattcatcgtgctgtaccctacatacagccgaactataaaaagaaagggcttcccaggtggaagccctatttcttttatggaatcagcaggctggaaccttgcgtcgcccggctttccagaatctcatgcgcacgctgcgcatccttcagcggatatttctgctgctcggcgacatcgaccttaatcacaccgctggcaatcaaagagaacagttcattactggcctcggttaattcctcccgcgtggtgatatagccttgcagggaagggcgtgtcacatacaacgagcctttttgattgagaatgcctaagttcacaccggtaaccgcacctgatgagttgccaaaactgaccattaagccgcggcgttgcaggcaatccagcgaccgttcccaggtgtctctgcccacggaatcgtacaccacgcgcactttcttaccgccggtgatctcttttaaccgctcgaccagatcctcttcacgatagttaataacctgccacgcgcccgcttttagcgcgctctgcgctttttgcgcggttcctacggtgccgataagtttcgcgcccagggcttttgcccactggcaggcaattaagccaacgccgccagccgctgcgtggaacaggaactgttcatcgggtttaatttcataggttttgcgcagcagataataaaccgttaagcctttcaggaaggatgccgcagcttgctcaaaagaaattgccgcaggcagaatcgccgctttatccgcaataatgttatgcacagagctgtaagcgcctaacgccgactgcgcatagactacacgatcgcctgccttaatatgctttacaccactgccgactttactcacgatgcctgctgcttcggtgcctaatccgctgggtagcgatggcggcgggtaaaggccgctgcggatatatgtgtcgataaaattgatgccgatggctttattttcgacctggatttcattctccgccggatcggcaggagtgaactctacggcttgaagtacttccgggccaccgtgcttgtgaaattcaattcgtgttgccatgtgtcctccagaacgtatcgtcagggtctgcttcatatgataaagtttcgacccattctttatctcggtaactccattcactatggcaggaaataaacccttcaacaaacagcaggctgaaccccgcgaacgcgatccacaagttgccgggctgaaagtgcctccgcactcgatcgaagcggagcagtcggtgttgggcggtttaatgctagataacgaacgctgggatgatgtagccgagcgtgtggtagcagacgatttttacacccgcccacaccgtcatatctttactgaaatggcgcgtttgcaggaaagcggtagccctatcgatctgattactcttgcggaatcgctggaacgccaggggcaactcgatagcgtcggtggttttgcttatctggcagagctgtcaaaaaatacgccaagtgcggctaacatcagtgcctatgcggacatcgtgcgtgaacgtgccgttgtccgtgagatgatctcggttgcgaatgagattgccgaagctggttttgatccgcaggggcgtaccagcgaagatctgctggatctggctgaatcccgcgtctttaaaattgccgaaagtcgtgcgaacaaagacgaagggccgaagaacatcgccgatgtgctcgacgcaaccgtggcgcgtattgagcagttgtttcagcagccacacgatggcgttaccggggtaaacaccggttatgacgatctcaacaaaaaaaccgctggcttgcagccgtcggatttgatcatcgtcgccgcgcgtccgtcgatgggtaaaacaacatttgcgatgaacctcgtcgaaaacgcggcgatgttgcaggataaaccggtacttatcttctcgctggagatgccatcagaacagatcatgatgcgttctctggcgtcgctgtcgcgcgttgaccagactaaaatccgtaccgggcagctcgatgacgaagactgggcgcgcatttccggcaccatgggtattttgctcgaaaaacgcaatatctatatcgatgactcctccggcctgacgccaacggaagtgcgttcccgcgcacgccgtattgcccgtgaacacggcggcatcgggcttatcatgatcgactacctgcaactgatgcgcgtaccggcgctttccgataaccgtacgctggaaattgcagaaatctctcgctcgctgaaagcactggcgaaagaactgaacgtgccggtggtggcgctgtcccagttgaaccgttctctggaacaacgtgccgacaaacgcccggtcaactccgacctgcgtgaatctggctctatcgagcaggatgcggacttgatcatgtttatctatcgtgatgaggtgtatcacgaaaacagtgatttaaaaggcatcgcggaaattattatcggtaaacaacgtaacggcccaatcgggacggtacgcctgacctttaacggtcaatggtcgcgcttcgacaactatgcggggccgcagtacgacgacgaataataattattttatgaattaggtaattaaagcaaacacttatcaaggaacacaaatgcaagcggcaactgttgtgattaaccgccgcgctctgcgacacaacctgcaacgtcttcgtgaactggcccctgccagtaaaatggttgcggtggtgaaagcgaacgcttatggtcacggtcttcttgagaccgcgcgaacgctccccgatgctgacgcctttggcgtagcccgtctcgaagaagctctgcgactgcgtgcggggggaatcaccaaacctgtactgttactcgaaggcttttttgatgccagagatctgccgacgatttctgcgcaacattttcataccgccgtgcataacgaagaacagctggctgcgctggaagaggctagcctggacgagccggttaccgtctggatgaaactcgataccggtatgcaccgtctgggcgtaaggccggaacaggctgaggcgttttatcatcgcctgacccagtgcaaaaacgttcgtcagccggtgaatatcgtcagccattttgcgcgcgcggatgaaccaaaatgtggcgcaaccgagaaacaactcgctatctttaataccttttgcgaaggcaaacctggtcaacgttccattgccgcgtcgggtggcattctgctgtggccacagtcgcattttgactgggtgcgcccgggcatcattctttatggcgtctcgccgctggaagatcgctccaccggtgccgattttggctgtcagccagtgatgtcactaacctccagcctgattgccgtgcgtgagcataaagccggagagcctgttggttatggtggaacctgggtaagcgaacgtgatacccgtcttggcgtagtcgcgatgggctatggcgatggttatccgcgcgccgcgccgtccggtacgccagtgctggtgaacggtcgcgaagtaccgattgtcgggcgcgtggcgatggatatgatctgcgtagacttaggtccacaggcgcaggacaaagccggggatccggtcattttatggggcgaaggtttgcccgtagaacgtatcgctgaaatgacgaaagtaagcgcttacgaacttattacgcgcctgacttcaagggtcgcgatgaaatacgtggattaatcgttctgtaatatttgattgtctgtgccggatgcggcgtgaatgccttatccggccaataaaatcctaaaaattcaataagttgatgttctttcatgctcttataaaggtcgtgcctctggcggatgtacgtttgtcatgagtctcactctgttgctaattgccgttcgctcctgaacatccactcgatcttcgccttcttccggtttattgtgttttaaccacctgcccgtaaacctggagaaccatcgcgtgtttcaaaaagttgacgcctacgctggcgacccgattcttacgcttatggagcgttttaaagaagaccctcgcagcgacaaagtgaatttaagtatcggtctgtactacaacgaagacggaattattccacaactgcaagccgtggcggaggcggaagcgcgcctgaatgcgcagcctcatggcgcttcgctttatttaccgatggaagggcttaactgctatcgccatgccattgcgccgctgctgtttggtgcggaccatccggtactgaaacaacagcgcgtagcaaccattcaaacccttggcggctccggggcattgaaagtgggcgcggatttcctgaaacgctacttcccggaatcaggcgtctgggtcagcgatcctacctgggaaaaccacgtagcaatattcgccggggctggattcgaagtgagtacttacccctggtatgacgaagcgactaacggcgtgcgctttaatgacctgttggcgacgctgaaaacattacctgcccgcagtattgtgttgctgcatccatgttgccacaacccaacgggtgccgatctcactaatgatcagtgggatgcggtgattgaaattctcaaagcccgcgagcttattccattcctcgatattgcctatcaaggatttggtgccggtatggaagaggatgcctacgctattcgcgccattgccagcgctggattacccgctctggtgagcaattcgttctcgaaaattttctccctttacggcgagcgcgtcggcggactttctgttatgtgtgaagatgccgaagccgctggccgcgtactggggcaattgaaagcaacagttcgccgcaactactccagcccgccgaattttggtgcgcaggtggtggctgcagtgctgaatgacgaggcattgaaagccagctggctggcggaagtagaagagatgcgtactcgcattctggcaatgcgtcaggaattggtgaaggtattaagcacagagatgccagaacgcaatttcgattatctgcttaatcagcgcggcatgttcagttataccggtttaagtgccgctcaggttgaccgactacgtgaagaatttggtgtctatctcatcgccagcggtcgcatgtgtgtcgccgggttaaatacggcaaatgtacaacgtgtggcaaaggcgtttgctgcggtgatgtaatgcaggaaagcaggctggagctacccagcctgcagtgaaattaaactgtcgtcgctttcactctttctttatagatgatttttttgatgccatcgttctacgtgagagataataaacgttgttagttcttttattgttaagcttatcccaattatctggaattccttatcctgtttttttgggtggagtaataatttctgcacatctaaccattattaaatttaataataagtatcgggtttgttacgatagaatatttctatatcctcaagaatatgctttgccttattgcctgtgactttctgagattcaattatagtatcgttaaattctaatgttaaagagaactcttttttccgctttgtgtaagtttaaccttatattgattaccaatatcaaataaaaaggtcctgtaatgagaataatcacctttaacctcctcggcaaaacagcaaagcgtgcaaatatacataaagtctttcttacccctgattttgttaactaaatcaataaatgcgtgaaaaactttacttgcaatagaacttgatacttcttctccaggtctaaaaaatcttttgcaatttttaactgtgtttctatgtataaaaagaaatctttggcataagagatatctttattatttagtgcatctagctcaacaggtaaagatgtcgttttgttgctattcacatatgatatattcatatcatcatctccatcgcgagtaataaaattaatcaccattgtagggtagggggctggtcaatcagaaatcatctttataaacttcgattgtttttgtaatgctgtatcattaagttcattaaatcgtacagcagataaatgttctatcaaatttcgctcatttgccgaggattcatcataataaacgtaaaattaatgtatccttacatcgagtaataaacattttttatacaaaaaaagacaggaacgtatttactgggttaaatataatcatcctgcttttcatcacaaaaaccgcagataatccttcctttccccggcagctggcgttatggtcagatggtttttgcaacaaatctcacaataaaaagtttcaacatactgactatttagggaaaaatatgcgcaagatcacacaggcaatcagtgccgtttgcttattgttcgctctaaacagttccgctgttgccctggcctcatctccttcaccgcttaaccctgggactaacgttgccaggcttgctgaacaggcacccattcattgggtttcggtcgcacaaattgaaaatagcctcgcagggcgtccgccaatggcggtggggtttgatatcgatgacacggtacttttttccagtccgggcttctggcgcggcaaaaaaaccttctcgccagaaagcgaagattatctgaaaaatcctgtgttctgggaaaaaatgaacaatggctgggatgaattcagcattccaaaagaggtcgctcgccagctgattgatatgcatgtacgccgcggtgacgcgatcttctttgtgactggtcgtagcccgacgaaaacagaaacggtttcaaaaacgctggcggataattttcatattcctgccaccaacatgaatccggtgatctttgcgggcgataaaccagggcaaaatacaaaatcgcaatggctgcaggataaaaatatccgaattttttatggcgattctgataatgatattaccgccgcacgcgatgtcggcgctcgtggtatccgcattctgcgcgcctccaactctacctacaaacccttgccacaagcgggtgcgtttggtgaagaggtgatcgtcaattcagaatactgacagagcgggagagcgtgatgctctcccgaatgctgtttttttaatcacacctttatcctttcgctgtcttgctgcaaactgattaagagagttttatcaaggagcagcacatgtggtatcaaaagacgctcacgcttagcgccaaatctcgtgggtttcatctggtaacggatgaaattctgaatcagctggctgatatgccgcgcgttaacatcggcttactgcatctgttgctgcaacatacctccgcctctctgacacttaatgagaactgcgatcccaccgtacgccacgacatggagcgttttttcctccgcaccgttcccgacaacggaaattatgagcatgactatgagggagcagacgatatgccttctcatatcaaatcctcaatgctgggaacatcgcttgtattgccggtgcataaagggcgtattcagaccggcacctggcaaggcatttggctgggggaacatcgcatccacggcggatcgcgtcgcatcatcgcgacactacaaggggagtaaaaaatgaccatttcggagttgctacaatattgcatggcaaaaccaggcgcagaacagagcgtgcataatgactggaaagcgacgcagatcaaagtggaagatgtactgtttgcgatggtgaaagaagtagaaaatcgcccagctgtttcgctgaaaaccagcccggagctggcggagctgctacgtcagcagcacagcgatgtgcgtccaagccgccatctgaataaagcgcactggagcaccgtgtatctcgacggttcgctgccagattcgcaaatctattatctggtggatgcgtcttatcagcaggcggtgaatttactgccggaagaaaaacgtaaattgctggtgcaactctgaaaggaaaaggccgctcagaaagcggccttaacgattacagcatcggcttaaggaagcgtgccgtgtgtgatgcttcgcactccgcgacggtttctggcgtaccggagacgaggatctcgccgccaccactgccgccttctggtcccaggtcgacaatccagtcagcggttttgatcacgtcgagattgtgctcaatcaccacaatggtgttgccctgatcgcgcagtttatgcagtacgtcgagcagttgctgaatatcggcgaagtgcagaccggtggtcggctcgtcgagaatatacagcgtctgcccggtgccgcgttttgacagttcacgcgccagcttcacgcgctgggcttcaccgcctgaaagggtggttgcggactgccccagtcgaatgtacgtcaggccaacgtccatcaacgtttgcagcttacgcgccagtgcaggtacggcatcaaagaactcacgcgcctcttcgatggtcatatccagcacttcgtggatggttttgcctttgtacttaatctccagcgtttcacggttatagcgtttacctttgcactggtcgcacggcacgtagatatccggcaggaagtgcatctccactttgatcacgccatcgccctgacaggcctcgcagcgtccgccacgaacgttaaagctgaaacgtcccggcgtatagccgcgcgcacgggattccggtacgcccgcaaacagttcgcgcacaggcgtaaacacgccggtataggtcgccgggttagaacgtggagtacgaccaattgggctttggtcgatatcgatcactttatcgaaatgctccagcccctgaatatcgcgatacggtgctggttcggcgatggtcgccccattcaactggcgttgggcaatcgggaacagtgtgtcgttaatcagcgtcgatttaccggaacctgaaaccccggtgatgcaggtaaacagacccaccggcagcgtcagcgtcacgtccttcaggttgttgccgcgtgcgcctgtcagcttcagcactttttccggattcgccggaacgcgtttcttcggcacttcaatcttgcgtttgccgctcatgtactgcccggtcaacgactccggcaccgccataatcgcttccagcggaccttctgcgaccacttcaccgccgtgaacacctgcgcccgggccaatgtcgatcacatggtcagcggcgcgaattgcgtcttcgtcgtgctccaccacaatcacggtattaccgagatcgcgcagatggataagcgtacccaacaggcgctcgttatcacgctggtgcaggccgatagacggctcgtccagcacgtacataacgccaaccaggcccgcaccaatctggctcgccagacggatacgctgtgcttcaccgccagaaagcgtttctgccgagcgggaaagcgtcaggtaattcaggccgacgttaacgaggaatttcagacgatcgccgatctctttaaggattttttctgcaatcttcgcccgctgacctgcgagtttgagattgttgaagaattccatcgcatgaccaatgctcatgtcggagatagcaggcagcggcgtattctcgacatacacgtggcgcgcttcccgacgcagacgcgtcccttcgcagctggcgcacggacgattactgataaacttggctaattcttcgcgtaccgcgctggattccgtctctttatagcggcgctccatattatgcagcacgccttcgaacggatgacgacgaatggaggtatcgccacgatcgttcatgtatttgaattcaatgttttctttgccagaaccgtacaacaccactttatgcacgttcgcgctcaggctgccccacggcgcttcgacgtcgaacttatagtgatctgccagcgatttcagcatctggaaataatagaagttgcggcgatcccagccacggatcgcaccaccagccagcgacagttccggattctggatcactcgatcaggatcgaaatattgctgtacgccaaggccgtcgcaggtcgggcaggcccccgccgggttgttaaacgaaaacagtcgcggctccagttcacgcatactgtagccgcaaattgggcaggcgaagttggcggagaacagcagctcttccgctttcgggtcgtccatatccgccactaccgcggtaccaccggaaagctccagcgcggtttcaaatgactcggcaagacgttgggtaagatcgtcacgcaccttgaagcgatcaaccaccacttcaatggtatgtttcttttgcagttccagttttggcggatcggaaagatcgcagacttcgccatcaatacgagcacggatgtagccctggcttgccaggttctccagcgttttggtgtgttcgcctttgcgctctttaatgattggcgcgagtagcatcagacgcttgccttccggctgcgacagcacgttatccaccatctggctgacggtttgcgccgccagcgggacgtcgtggtccggacagcgcggctcgccaacgcgggcgaataacaaacgcaaatagtcgtggatttcggtgattgtccccaccgtagaacgcgggttatgagacgtcgatttctgctcaattgagatggcaggagaaagcccctcaatatgatcgacgtccggcttttccatcagtgacagaaactgccgcgcgtaggcggaaagggattcaacgtaacggcgctgcccttcggcatataaggtgtcgaaagcgagcgaggatttgccagaacccgaaagcccggtcacgacaatgagcttgtcgcgggggataacgaggttgatgtttttgagattatgggtgcgggcgccccgaacttcgatcttatccattcacctttcccggattaaacgcttttttgcccggtggcatggtgctaccggcgatcacaaacggttaattatgacacaaattgacctgaatgaatatacagtattggaatgcattacccggagtgttgtgtaacaatgtctggccaggtttgtttcccggaaccgaggtcacaacatagtaaaagcgctattggtaatggtacaatcgcgcgtttacacttattcagaacgatttttttcaggagacacgaacatggccagcagaggcgtaaacaaggttattctcgttggtaatctgggtcaggacccggaagtacgctacatgccaaatggtggcgcagttgccaacattacgctggctacttccgaatcctggcgtgataaagcgaccggcgagatgaaagaacagactgaatggcaccgcgttgtgctgttcggcaaactggcagaagtggcgagcgaatatctgcgtaaaggttctcaggtttatatcgaaggtcagctgcgtacccgtaaatggaccgatcaatccggtcaggatcgctacaccacagaagtcgtggtgaacgttggcggcaccatgcagatgctgggtggtcgtcagggtggtggcgctccggcaggtggcaatatcggtggtggtcagccgcagggcggttggggtcagcctcagcagccgcagggtggcaatcagttcagcggcggcgcgcagtctcgcccgcagcagtccgctccggcagcgccgtctaacgagccgccgatggactttgatgatgacattccgttctgatttgtcattaaaacaataggttatattgttttaaggtggatgattaaagcatctgccagccataaaaaagaagcctccgttatggaggcttctacgtatcaggtcaaaatcattggccattgtggcggtgtctgattcatctcttctatcatcaccgactcgatgttgtgccagatagcggtgatgtccgccattgtgatgccaagcaaccccattgcgaaccaacaggcggaaacaacgcccagaccgctgctgatcaccgcaagcccgacataatcagaccgacgaaaacggatgttgagtgtgctggccagaaacatcattacggcactaagaagttgccagcgaagaagaaccacgccagtggtgagggtagccatcaaacaattcctctgaaaagagccgatgccctggacagcgcggcgttgttcacgggaggcgtggtacactctggctatcgcggggcttgcagaacacaaaaatgaaacactctgtttgtttcattaattttgtgaactatatcacaattgattgtttgttagccatattaggccgtgacttttattgctgtacagattatgtggtttttcagtggcattaagggcatatcttcccgccgcctctgcattcctgtaggaaattaattttgaatatcaatgaattattttcatccaggtgacgattagaaaggtatcaatttcaaatcaggcaaaagtgctatttataccgtaagatttatctaaagacgtcggtacccagggttttcaccttgcaatggccgggtataaacaggcaggaaattgatagcaatgagtcatcgtgcacgacaccaattactggcgttgccgggcattatctttttagttctctttcccatcattctttcgctatggattgccttcctttgggcaaaatcagaagtgaataatcagctccgaacctttgctcaactggcactggataaatccgagctggtcattcgccaggcagatttagtgagcgatgcagctgaacgctatcaggggcaagtttgcactccagcccatcaaaagcgaatgttgaatattattcgtggctatctttatattaatgaattgatctatgcccgtgataaccattttttatgctcatcgctgatagcgcctgtaaacggctatacgattgcaccggccgattataagcgtgaacctaacgtttctatctattattaccgcgatacgccttttttctctggctataaaatgacctatatgcagcggggaaattatgtggcggttatcaaccctctcttctggagtgaagtgatgtctgatgacccgacattgcaatggggtgtgtatgatacggtgacgaaaacctttttctcgttaagcaaagaggcctcggcagcaacgttttctccgctgattcatttgaaggatttaaccgtacaaagaaatggctatttatatgcgacagtttattcgacaaaacgcccaattgcagccattgttgcgacttcatatcaacgtcttataacccatttttataatcatcttatttttgcgttgcccgccggtattttggggagtcttgttctgctattactctggctacgtattcgacaaaactatttatctcccaaacgtaaattgcaacgcgccctcgaaaaacatcaactttgtctttattaccagccaataatcgatatcaaaacagaaaaatgtatcggcgctgaagcgttgttacgttggcctggtgagcaggggcaaataatgaatccggcagagtttattccgctggcagaaaaggaggggatgatagaacagataactgattatgttattgataatgtcttccgcgatctgggcgattacctggcaacacatgcagatcgctatgtttctattaacctgtcggcctccgattttcatacgtcacggttgatagcgcgaatcaatcagaaaacagagcaatacgcggtgcgtccgcagcaaattaaatttgaagtgactgagcatgcatttcttgatgttgacaaaatgacgccgattattctggctttccgccaggcaggttacgaagtggcaattgatgattttggtattggctactctaacttgcataaccttaaatcattgaatgtcgatattttgaaaatcgacaaatcgtttgttgaaacgctgaccacccacaaaaccagtcatttgattgcggaacacatcatcgagctggcgcacagcctggggttaaaaacgatcgctgaaggcgtcgaaactgaggagcaggttaactggctgcgcaaacgcggcgtgcgctattgccagggatggttctttgcgaaggcgatgccgccgcaggtgtttatgcaatggatggagcaattacccgcgcgggagttaacgcgcgggcaataaaattacaggcggtggcgataatcgctgggagtgcgatcaaactgccgacggaaaacgcgggagaaggtctgctgcgagacataacccaggtccattgcgatatcaaaaatcggacgctcggtggtgcgcaactcaacggcggccagtaacaggcggcgttggcgaatgtaatcgccaagcgtctgatgcgtcaccgtgcggaacattcgttgcaagtaccactttgaatagcctgatttttttgcgactacatcaatgttaagcggctggtcaatatgctcgtcaatccatgcgataagatcctgaataattttctgatgggacataaatctgcctcttttcagtgttcagttcgttaattcatctgttggggagtataattcctcaagttaacttgaggtaaagcgatttatggaaaagaaattaccccgcattaaagcgctgctaacccccggcgaagtggcgaaacgcagcggtgtggcggtatcggcgctgcatttctatgaaagtaaagggttgattaccagtatccgtaacagcggcaatcagcggcgatataaacgtgatgtgttgcgatatgttgcaattatcaaaattgctcagcgtattggcattccgctggcgaccattggtgaagcgtttggcgtgttgcccgaagggcatacgttaagtgcgaaagagtggaaacagctttcgtcccaatggcgagaagagttggatcggcgcattcataccttagtggcgctgcgtgacgaactggacggatgtattggttgtggctgcctttcgcgcagtgattgcccgttgcgtaacccgggcgaccgcttaggagaagaaggtaccggcgcacgcttgctggaagatgaacaaaactaaagcgccacaagggcgctttagtttgttttccggtctttgtctttctctctatcccgctggtacacaggagggtttcccccgacgtcaacacacctcattcgagcacgtggtggaggttccggttggtgttgatgctttaattgtatgtcaccgacgtttcttcgccagtgtaaaagtatactttttaaccgcaatatttttgtcatctcagacgattttttatcgcaatcctgaacggtatacggctcgataacgctgcaatcttgcgcaccgacgataacgtttgcgcatcaattgcctggtttttcatcgtcaagacaataaaagagaaaaaagcagcaaacttcggttgaaaaagccgctatgatcgccggataatcgtttgctttttttaccacccgttttgtatgcgcggagctaaacgtttgcttttttgcgacgcagcaaattgtcgcaaacctggagcaggaagataacgtttcgctggcaggggattgtccgccacgcatcttgacgaaaattaaactctcaggggatgttttcttatgtctacgccatcagcgcgtaccggcggttcactcgacgcctggtttaaaatttcacaacgtggaagcactgtccgtcaggaagtggttgccgggttaacaacgtttctggcgatggtctactcggtcatcgtcgttccaggtatgttgggtaaagcaggcttcccgcctgcggcagttttcgttgcaacctgtctggttgccggactcggttctatcgtgatgggtctgtgggctaatctgccgttggcgattggttgcgccatctccctgacagcgtttaccgcattcagcctggtgctggggcaacatattagcgtacctgtcgcgctgggtgccgtgttcctgatgggtgtgctgtttacggtaatttctgccacgggtatccgtagctggattttgcgcaacttgcctcacggtgtggcgcacggcacggggattggtatcggtctgttcctgctgctcattgccgctaacggtgtcggtctggtgattaaaaacccgcttgatggtctgcccgttgcgctgggtgatttcgcgaccttcccggtgattatgtcactggtaggtctggcggtgatcatcggcctggaaaaactgaaagtccctggtggcattctgctgaccattatcggtatctcaattgtcggtttgatcttcgatcctaacgtccatttctccggcgttttcgccatgccttcattgagcgatgaaaacggcaattcactgattggcagcctggacattatgggcgcgctgaatcctgtagtcctgccaagcgttctggcgctggtgatgacggcagtatttgatgccaccggaactatccgtgccgtcgccggccaggcgaacctgctggataaagatgggcagatcatcgacggtgggaaagcactgaccactgactccatgagcagcgttttctctggcctggtgggtgcggctccggcagcggtatacatcgagtctgcggcgggtacggcggcgggcggtaaaaccggtttgacggctatcaccgttggcgtgctgttcctcctgattctgttcctctctccgctctcttacctcgttccggggtatgcaacggctccggcgctgatgtacgttggcctgctgatgctgagcaacgtggcgaaaatcgactttgctgattttgttgatgcgatggcgggtctggttacggctgtattcatcgtgctgacctgtaacatcgtaacaggcatcatgatcggcttcgcgactctggtgattggtcgtctggtttccggcgaatggcgcaagttgaacatcggtacggtcgttatcgccgtggcgctggtgaccttctatgcgggtggctgggctatctaatctttcatcggattctgaaaacgggtggcaatggctgcccgtttttattttctccgcacattgtgtgagcttttgcgatattctgaaaaaaatgagaattcaggcataacgtctttctcagatcataaaaaacatcgcaaacagggaacgcatggaaatcttcttcaccatactgataatgaccctcgtggtctcgctgtccggggtggtcactcgtgtcatgccctttcagatcccgcttccgcttatgcaaatcgccatcggtgcgctactggcgtggccgacgtttggtttgcatgtggagtttgatcctgaactctttttagtcttgtttatcccgccgttgctgttcgctgatggctggaaaacgccgacccgtgaatttctcgaacatggtcgagagattttcggcctcgcgctggcgctggtggtggtcaccgtggtcggcattggcttccttatttactgggtggtgccgggcattccgctgatccctgcctttgcgctggcggcggtgctttctccgaccgatgctgtggcgctctccgggattgttggcgaagggcgcatcccgaaaaaaatcatgggcattttgcagggcgaagcgttgatgaatgacgcctccggtctggtgtcgttgaagtttgccgtagcagtggcgatggggacgatgatcttcaccgtcggcggtgcgacggtcgaatttatgaaagtagccattggcggtattctcgccggttttgtggtgagctggctgtacggtcgctcgctgcgattcctcagccgctggggcggtgatgaacccgcgacgcagatcgtcctgctgttcctgctgccattcgcttcttatctgattgccgaacatattggcgtttccggcatcctcgctgcggttgccgccgggatgaccatcacccgctccggtgtgatgcgccgtgcgccgctggcaatgcgcctgcgtgcaaacagcacctgggcgatgctggaatttgtctttaacggcatggtgttcctgctgttaggtctgcagctgccgggtattctggagacgtcgctgatggcagcagaaatcgaccctaacgtcgaaatctggatgctgtttaccaatattattctgatatatgcggcgctgatgctggtccgtttcggctggctgtggacgatgaaaaagttcagcaaccgcttcctgaagaagaagccgatggagtttggttcgtggaccacacgagaaatcctgatcgcgtctttcgccggggtgcgtggggcgatcactctggccggtgtgctctctatcccgctgctcttgccggatggtaacgtcttcccggcgcgctatgagctggtgttcctggcggctggcgtcattctcttctcgctgtttgtcggcgtggtgatgttgcctattctgctacaacacattgaagtcgcggatcattcgcaacaattgaaagaggaacgtattgcgcgagcggcaacggcagaagtggcgattgtggcgatccagaaaatggaggagcgtctggcggcggataccgaagagaatatcgataaccagctgcttacggaggtcagttctcgcgtcattggtaacctgcgtcgtcgcgccgatggacgtaacgacgttgaaagttccgtgcaggaagagaaccttgagcgtcgcttccgtctggcggcattgcgttctgaacgtgctgaactttaccacctgcgcgccacacgggagatcagcaacgaaacgctgcaaaaattactgcacgatctcgatttgcttgaagcgttgctaattgaggaaaatcagtaagccgaaagcgacgtaaccaggcccgaggtaatctgaaaaaggtgcaatcttttgcacctttaacaggttagctcgggctaacattcatgattctaaaacaaataaattatctctcttttaaagtcaattcattggctgttcttcgacttaacctcaatctgcatcttgcataatatctgcagtaatcttcatagcgactgcatgaagattatcctcagtttgtgacatgccagtatgagtggcacaatcttcttcaaagaatttctgtagtgttaccaggatatcactattaatggagatattttcctcaccacggagaatggtaatacccattccctggacgctagcctcatcgaaattaacacgatagagacggatattaaacatccaggcttttgttaaaacagaacagttgaaatggcaattgcttaaattggcattattaaaattaacattagccatattagagtcggtacatataaccatttcgaggaacgtatttgttaaccgcgtaaaaaagagtttgctatcaattaagtttatattctggagggttgctttattcaggttgacacgagacagatcagcatgttcaaagttaattaaatcaagtttagagaagctaaggtcggctctaaataaattaatatatggcgctattactttataaagatttacctcagccatgtatgccatataaaaatttgaataatcaaggaaggtatttttaatattggctctattcattgttgcattgtagaattgaacatgcatagcggaacatgaatttagagttccgtcagtcatttttatctgagcgaaatttgagtcatcgagaatacaattatcaaaaagtattttttccattatggcgaaattaaaattcgttttatacatattacagtcctgaaaaatagcgttttgtagtctgcaacctgcaaaattcgaattggataaatcttcatctttaatcacgatacctttcaggctaaggtgtgaaaaatcgtaaccaccatttactgtctgtgggatttcgatagtattattatggacggtgacattatttataaaatataccaccttaattgacacttccttatctttattaaggtaaactcttctcgtaattctatcgtcacatttattatttgcatgtgaagctatatctataaaatatttatgtattttcctgtccgtttctttcgtgatttttcctgatggtaaactatcataaattcttttcattttctgaatcaagcctatcactttttcatgatcatccattttgaaaagagagagggctttattgtcaattaacgtgtttttatgatgtttgctgtaattatctgattttgttttctttgtatgtgatggacttgtgacagagtggttatcgttaatcaggcaaagagggaaaaacatattatttaaaccattatagcgcataaaatatccttataattaacaagaaagaaaaggcatattctctgcattatcattttctacgactgtcaaaaatcgctcattttttaatgagtttatttgtttaatattatgggaaaaggtgatgcatttgggagaggaagagtattccccggtcagacgaccggggaaggggagagattaatgcgcgcggccttgctcaacgccaaagccggtctgggagcggataaactgcgcgcggaacagttcacgctcacgcgcgccttccgctgagttatcggttgccgagaagaaccagatgccgaggaatgccacggtgatagagaacagcgccgggtattcatacgggaagatggctttttcgtgaccaaggatctgtacccaaatcgtcgggccgaggatcatcagtactactgcggtaatcagccccagccagccacccatcatcgcgccacgcgtggtcagtttcgaccagtacatagaaagcagaatgatcgggaagttacagctcgccgcgatggcaaacgccagccccaccataaaggcgatgttctgattctcaaacagcacgccgaggataatcgcaatcacgccgaggatcagtacggtgatttttgatacccgcagctcttcacgttcggtcgcgccttttttgaagacgttagcgtacaagtcatgcgaaaccgcggatgcgcccgccagcgtcagacccgcaaccaccgcgaggatagtggcgaaagcaaccgctgaaataaaaccgaggaacaggttgccgcccactgcattcgccaggtgaacggccgccatgttgttaccaccaatcagatggcccgccgcgtctttatattccggattcgcaccaaccagcatgatcgcgccgaagccgataataaaggtcagaatatagaagtagcccataaacccggtggcgtagaacacgctcttacgtgcttcgcgggcatcgctgactgtaaagaagcgcatcagaatgtgcggcaagcccgccgtaccaaacatcagtcccagacccagagagagcgcggagatcggatctttcaccagcccgcccggcttcatgatgtcgacacctttcgggtgtaccgccatcgcttcactgaacagattgttgaagctaaagccgacgtgtttcatcaccataaaggccataaagctggcaccgaacagcaacagcacggctttgataatttgcacccaggtggtcgccagcatgccgccgaacaggacgtacatcatcatcagcacgccgaccagcaccaccgcaatgtgatagttaaggccaaacagcagctcgatcagtttacctgcgcccaccatctgggcgataaggtaaagcgccaccaccaccagagaaccacaggccgaaagaatacgaatcggcccttgtttcagacggtaagaggccacatcggcaaaggtgtagcgccccaggttacgcagacgttcggcaatcaggaacaaaatgatcggccagcccaccaggaagcccagcgagtaaattaagccgtcatagccggaggtaaacaccagcgcggagatccccaagaatgaggcggcggacatatagtccccggcaatcgccagcccgttctggaagccagtgatattgccgcctgcggtgtagtagtcgctacgagaacgtacgcgttttgatgcccagtaggtaatgccgagcgtaaacacgacgaaaatcaggaacataataatcgcctgccagttcgttggctggcgctctacggccccgctaatagcatccgcggcgttagctgcgaaagggagtgtggcggcaagcgccgtcagaactcttttcatgatgcttgtacctcatgcaggacttcattattaagacggtcgaattcgccgttcgcccgccagatgtagataccggtgagaacaaaggagatcacaatcactccaacaccaattggaataccgcgtgtgacgctggtgttcggattcagcggcgtgcccagccagccgggcgcgaaggcgatcagtaaaataaagccgatataaactgccagcataataatcgacaggatggtggcaaaccgttgccgtttttcgactaactccctgaaatgcgcattgtcttctatccgctgataaatagtgccattcatcacagattctccagaggtaatgtagggattgttttaattcccgctcccttatgggagaaggttaacgctcgggtaacccttgccgaatgtaggccggataaggcgtttacgccgcatccggcaatcaatgcctgatgcgacgctgtcgcgtcttatcaggcctacaaaccgttaccgactcgcatcgggcaattgtgggttacgatggcatcgcgatagcctgcttctcttcaagcagcttctcgactacgccaggatcggcaagcgtcgaggtatcgcccaggttgctggtatcgcccgccgcaattttgcgcagaatacggcgcataattttgccggagcgggttttaggcagggagtcggtccagtgcagcacgtctggcgtcgccagcgggccaatctctttacgcacccagttgcggacttctgcgtacagttctggtgacggttcctccccgtgattaagcgtgacgtaggcgtagatcgcctgacctttaatattgtgcggaatacctactacggcggcttcggcaatcttcggatgcgccaccagcgccgactcaatctctgccgtccccagacggtgaccggagacgttcagcacgtcgtccacacgcccggttatccagtaatagccatcttcatcgcgacgcgcgccgtcgccgctgaaatacatatttttgaaggtggagaagtaggtctgttcaaaacgttcgtgatcgccaaacagcgtacgcgcctgacccggccaggagtcggtgattaccaggctaccttcggtggccccctccagcgggttaccttcgttatcgaccagcgccggttgcacgccgaagaacggacgtgttgccgaaccggctttcagctcggtagcgccaggcagcggggtgatcatgaaaccgccggtttcggtctgccaccaggtatcgaccaccggacatttctcgttgccgatttttttccagtaccactcccacgcttccgggttaattggctcgcccacggaaccgagaatgcgcagcgacgaacggtcggtgccttcgatcgctttatcgccttccgccatcagcgcgcggatcgccgtgggtgcggtatagagaatattgacctgatgcttgtccaccacctgcgccatacgggcaggcgtcggccagttgggtacgccttcaaacatcagcgtggtcgcaccgcaggccagcgggccgtacagcaagtaactgtgtccggtcacccagcccacatcggcggtgcaccagtagatatcacccggatgataatcaaagacatatttaaaggtcagcgccgcgtacaccagataaccgccggtagtatgcagcacaccttttggcttaccggtagaaccggaggtgtagagaataaacagcggatcttcggcgttcatctcttccgcctggtgctgatcgctcgcttgctcaaccaggtcgtgccaccacaggtcgcgcccttcctgccagtcaattttcccgccagtacgcttcagtaccaccacatgctctacgctggtgacgttcgggtttttcagcgcgtcatcaacgtttttcttcagcggaatactgcgcccggcacgcacaccttcgtcggaagtgatcaccagtcgtgagttggaatcaataatgcgcccggcaacggcttccggcgagaagccgccgaaaatcaccgaatgcaccgcgccaatgcgggcgcaggccagcatcgcaaccgcggcttccggcaccatcggcatataaatcgccaccacatcaccttttttaatgcccagctcgagcagggtattggcgaagcggcagacgtcgcggtgcagctctttatagctgatatgtttgctctggctggcgtcgtcgccttcccagatgatggcggtacgatcgccgttttcttgcagatggcggtcaaggcagtttgccgccagattcagcgtgccgtcctcgtaccatttaatggacacattaccgggggcaaaggaggtgtttttcaccttctggtaaggtttgatccagtcaagaatttttccctgttcgccccagaaggtatcaggtacgttaatagattgttgatacatcgcctcgtactgctgagggtttatcaggcaacggtctgcgatgttggcaggaatggtgtgtttgtgaatttggctcatgcttttgttctccttgtaggatgttaataatatgtggcataagcgttaaatgtaggggtattggcagttttgtttagtatttgggcgacagatcacgcaaaagtagaattgtgcaaataaacggcagggtaatttttgaaggtcagcaacaaaagttgattaattctttgaggaacatgcagttatgcatgctgttgaaaaagaggaagatactgactaactctaaagtggtattttacatgcacttacaattgattaaagacaacattcacagtgtggttatttgttacacataggggcgagcaatgtcatgacagtgtaggtgcggttactgtcgtgaaaaacaataaaaaccgccattgcaacaatggcgcaattcggatgaagcccctatgacaaggataaaaataaacgcacgccgtatcttcagcttattgattccttttttctttttcacttctgttcacgctgaacaaacggctgctcccgcaaaacctgtaactgtggaagcgaagaatgaaacctttgccccgcagcatcccgatcaatatctctcctggaaagccacctcggaacagtcagagcgtgttgacgccctggcggaagatccacggctggtgatcctgtgggcggggtatcccttctcgcgcgattacaacaagccgcgtggacatgcttttgctgtgaccgatgtgcgtgaaaccctgcgtaccggtgcgccgaaaaacgctgaagatggtccgctaccgatggcatgctggagttgtaaaagcccggatgtggcgcgtctgatccagaaagacggcgaagatggctacttccacggtaaatgggcgcgcggcggtccggaaatcgtcaacaacttaggttgtgccgattgccataacaccgcctctccagagttcgccaaaggcaaaccggagttaaccctttcccgtccgtatgcggctcgcgcgatggaagccattggtaaaccttttgagaaagccggacgtttcgaccagcaatcgatggtttgcggtcagtgccatgtggagtattacttcgacggcaaaaacaaagcggttaaattcccgtgggatgacggcatgaaagtcgaaaatatggagcagtattacgacaaaattgccttctctgactggactaactccctgtcgaaaacgccaatgctgaaagcgcagcacccggaatatgaaacctggacagcgggcattcacggtaaaaacaacgtgacctgtatcgactgccatatgccaaaagtgcagaacgccgaaggcaaactctacaccgaccataaaattggtaatccgtttgataacttcgcccagacttgtgcgaactgccatacccaggacaaagctgccttgcaaaaagtggtcgcggaacgtaagcagtcgattaacgacctgaaaatcaaggttgaagatcaactggttcacgctcacttcgaagcgaaagcagcgctggatgcaggcgcgacggaagctgaaatgaagccaattcaggacgatatccgtcatgcccagtggcgctgggatctggcgatcgcttcccacggcattcatatgcacgcaccggaagaaggtttacggatgctcggtacggcgatggataaagcggcggatgcacgcaccaaactggcgcgcctgctggcgaccaaaggcatcacccatgaaatccagatcccggatatctcaaccaaagagaaagcccagcaggccattggcctgaacatggaacaaatcaaggccgagaagcaggacttcatcaaaacggtgatcccgcagtgggaagaacaggcacgtaaaaacggtctgttaagccaataaccccgttccgcctcgcaaggggcggaaaacacaatggagtgaatatgagcgtattacgttcgttattaactgccggggtgctggcgtcgggcctgttgtggagcctgaacggaattaccgctacccctgcggcgcaggcatctgatgatcgctacgaagttacccagcagcgtaacccggatgccgcctgtctggactgtcataaaccagataccgaaggtatgcatggaaaacatgcttccgttatcaacccgaataacaaactgccggtcacctgcaccaactgtcacggccagccatcaccgcaacaccgcgaaggggtgaaagatgtgatgcgctttaacgagccgatgtacaaggttggagagcagaacagcgtctgtatgtcctgtcatctgccggaacagttgcaaaaagcgttctggccgcacgatgtccacgtaaccaaagtggcgtgcgccagctgccattccctgcatccacagcaagatacgatgcagacgttaagtgacaaaggacggattaagatttgcgtcgattgccacagcgatcagcgcaccaatccgaactttaacccggcgtctgttccgttgcttaaggagcagccatgacctggtctcgtcgccagtttctcaccggcgtcggcgtgctggcagccgtcagcggcaccgcagggcgcgtggtggcgaaaacgttgaatatcaatggggtgcgttacggcatggtgcatgacgagtcgttatgcatcggctgtaccgcctgtatggatgcttgtcgggaagtgaacaaggtgccggaaggcgtctcgcgcctgacgattattcgtagcgagccgcagggcgaatttcctgatgtgaaatatcgcttcttccgtaagtcttgccagcactgcgatcatgcgccgtgcgttgacgtctgcccgaccggtgcgtcttttcgcgatgctgccagtgggattgtcgatgttaatccggatctctgcgtcggttgtcagtactgcatcgccgcctgtccgtaccgcgtgcgctttatccatccggtcacgaagacggcggacaaatgcgatttctgccgtaagaccaatttgcaggccggtaagttgcccgcgtgcgttgaagcttgcccgaccaaggcgctgacgtttggcaatctggacgatcccaacagtgagatttcgcaactgctgcgccagaagcccacttaccgctacaagctggcgctgggaaccaaaccgaagctgtaccgcgtaccgtttaaatacggggaggtgagccaatgacgcagacttccgcatttcattttgaatcgctggtgtgggactggccgattgccatctacctgtttttgattggtatttctgctggtctggtgacgctggccgtgctgttacgtcgcttctacccgcaggcgggcggtgcagacagtacgttgctgcgcaccacgctgattgtcgggccgggcgcggtgatcctcggtctgttgatcctcgtcttccacctgacaagaccgtggaccttctggaagctgatgttccactacagttttacctcggtgatgtcgatgggggtgatgctgtttcagctctacatggtggtgctggtgctgtggctggcgaaaatctttgaacatgatttgcttgccctgcaacaacgctggttgccgaagctggggatcgtgcaaaaggttctgagcctgctgacgcccgttcatcgcggactggaaacattgatgctggtgctggcggtgttgttgggggcttataccggctttctgctgtcggcgctgaaatcgtatccgttcctcaataacccgatcctgccggtgctgttcctcttctccggcatctcgtccggtgcggcggtggcgctgatcgccatggcgatacgccaacgcagtaacccgcattccacggaagcgcagtttgtacaccgtatggaaatccctgtggtatggggtgaaatcttcctgctggtggcgttttttgtcggtctggcgctgggcgatgacggtaaagttcgtgcgctggtggcggcattaggtggcggtttctggacgtggtggttctggcttggtgtcgccgggctggggctgattgtgccaatgctgctcaaaccgtgggtcaatcgcagttccggcattcctgccgtgctggcggcgtgtggggccagtctggtcggcgtgttgatgctgcgctttttcattctctacgccggacagttgacggtggcgtaagccagaaaagaggtggtttctggacgtattccttcctgaagtcggttttctggcgttgttgttaagtctcggggtcaacgtgttgaccccgttgacggccttcgcgggagtgcggttgcgctggcctgccatgatgcgactcacttgcatcggcattctggcgcagttcgcgctcctgctgctcgcctttggcgtactgacgtattgttttctcatcagcgatttctcggtcatttatgtcgcgcaacatagctatagcctgctgtcgtgggaactcaagctggcagcggtgtggggcggccatgaaggttcgctgctgctttgggtgctgctgctttccgcctggagcgcgctgtttgcctggcattatcggcagcaaaccgatccgctatttccgctgacgttagccgttttatctctcatgctcgccgcactgctactgtttgtggtgctgtggtccgatcccttcgtgcggatatttccaccagcaatcgaaggccgcgatctcaatccgatgctgcaacatcccggtcttatctttcatccaccgctgctttaccttggctatggcggtttgatggtagcggcgagcgtggcgctggcgagtctactgcgcggcgagtttgatggtgcctgcgcccgaatttgctggcgctgggcgttacctggctggagtgcattaacggcggggatcatcctcggttcctggtgggcctactgcgaactcggctggggcggctggtggttctgggatccggtggaaaacgcctctttattaccctggctttctgccactgcgctgctgcacagtttgtccctgacacgccagcgggggattttttgccactggtcgctgttgctggcgatagttactctgatgctgtcgctgctgggcaccttaattgtccgttctggcattctggtttcggttcatgcgttcgcgctggataacgtccgcgccgtgccgttgttcagcctgtttgcactgattagccttgcgtctctggctctgtatggctggcgagcgcgggacggtggcccggcggtgcatttttcggggttatcgcgggaaatgttaatcctcgctacgctgttgctgttttgcgcagtgctactgatcgtgctggtgggaacgctttatccgatgatttacggcctgctgggctggggacgcctctccgttggcgcgccgtattttaaccgcgcgacgttaccgtttggtctgttgatgctggtggtgattgtgctggcgacgtttgtctctggcaaacgcgtgcagcttccggcgctggtagctcatgcgggcgtgctgttatttgccgctggggtcgtggtctccagcgtcagccgtcaggagatcagcctgaatttacagccgggtcagcaggtgacgctggcaggatacaccttccgttttgagtgcctcgatctacaagccaaaggcaattacaccagcgaaaaagcgatagtggcactgtttgaccatcagcaacgcattggtgaactgacgccggagcggcgtttttatgaagcacgccgtcaacaaatgatggaaccgtcaattcgctggaacggcatccatgactggtatgcggtcatgggggagaaaactgggccggatcgttacgcttttcgtttgtatgtacaaagcggtgtgcgctggatctgggggggaggattgttgatgattgcgggcgcattgttaagcggatggcgggggaagaagcgcgatgaataaagggcttctcacgctactgctgttatttacctgttttgcgcacgctcaggtcgtagacacctggcaattcgccaatccgcaacaacagcaacaggcgttaaatattgccagccagttacgttgtccgcagtgccagaatcaaaacttactggaatccaacgcgccggtggctgtcagtatgcgccatcaggtttacagcatggtggcggaggggaagaacgaagtcgaaatcattggctggatgaccgaacgctacggagattttgttcgctataacccaccgttaacgggtcagacgctggtgttatgggcgctgccagtggtgttgttactgctgatggcactgatcctctggcgagtgagggcgaagcgatgaaacagcccaaaataccggtgaaaatgctgacaacactcacgatattgatggtatttctctgtgtcggcagttatctgttaagcccaaaatggcaggcggtacgtgcggagtatcagcgtcagcgcgatccgctacatcagtttgccagccagcaaaccccggaagcgcagcttcaggcattgcaggataaaatccgcgctaatccacaaaacagcgaacagtgggcgttactgggcgagtactatctgtggcaaaacgattacagcaattcgttgctggcgtaccgtcaggcgttgcaactacgtggtgagaacgctgaactgtatgcggcgctggcgacggtgctttattaccaggccagccagcatatgaccgcccagactcgcgcaatgatcgacaaagccctcgcgctggacagtaatgaaatcaccgccctgatgctgctggcttccgatgcgtttatgcaggcgaactacgcgcaagccatcgaactatggcaaaaagtgatggatctcaactcaccgcgagttaaccgaacacagctggttgagtcgattaatatggcgaaattgttgcagcggagattggattaatcatctggtgatgaagattatgtcattgagctgcataaaaaataatcgaatgaacatatgccaaaaataatcactaatcagtattattgcagattaaacaaataaaaatctttccataacaaatggttattcattaatcctgccataaactcgcgttattatgcattaatgcagcgaaaagctctgttgttaaagggttgcgcaacataccgcgcaaatgatactgatcataagcgttaaaaaaatctacaaaccaacgcaacacaattcatgccctggcagtatgtcacgttctcgcgtttctgaacggggaacggcgctccattgaggaagtcattcatatgaaaaatataaaattcagcctggcctggcagattctgtttgctatggtgctgggcattctcctgggaagctacctgcactaccatagcgacagccgcgactggctggtcgtcaatttgctctctccggcgggtgatatcttcatccatctgattaaaatgattgttgtgccgattgtgatctccacgctggtggtgggtatcgcgggtgttggtgatgccaaacagctcgggcgtattggcgcgaaaaccattatctacttcgaggtgatcaccaccgtcgccatcattttggggatcactctggcgaacgtcttccagcccggtgccggggtggatatgtcgcagttggcgaccgtcgatatctcgaaatatcagagcactacggaagcggtacaaagcagttcccacggcattatgggcacgattttgtcgctggtgccgacgaacattgtggcgtcgatggcgaaaggcgaaatgctgccgatcatctttttctcggtgctgtttggtctggggctttcttccctgcccgcgacgcatcgtgaaccgctggtgaccgtgttccgctccatctctgaaaccatgtttaaagtgactcacatggtgatgcgttatgcaccggtgggtgtgtttgcgctgattgcggtgacggtggctaactttggtttctcgtctctgtggccactggcgaaactggtgctgctggtgcatttcgccattctgttcttcgcgctggtagtgctgggaattgtggcgcgcctgtgcgggttaagcgtctggatcctgattcgtattctgaaagatgagctgattctggcgtactccactgccagctctgaaagcgtgctgccgcgaattattgagaagatggaagcctacggagcaccggtgtcgatcaccagtttcgtggtgccgaccggttactcttttaaccttgatggttcgacgctgtatcaaagtattgccgctatcttcatcgcgcagttgtatggcattgacctgtccatctggcaggaaatcattctggtgctgacgctgatggtgacctcgaaagggattgctggcgtgcctggcgtgtcgtttgtggtgttgctggcaacgctgggtagcgtaggtattccgctggaaggtctggcgtttattgctggtgttgaccgtatcctcgacatggcgcgtactgcgctgaacgtggtgggtaatgcgctggcggtgctggtgattgccaagtgggaacacaaatttgaccgtaagaaagcgctggcttatgagcgtgaagtgctgggcaaatttgataaaactgcggatcaataattgaagattgccggggatatccacccggcaatgtgtgaatgcctgatgcgacgcttgccgcgtcttatcaggcctacgccagacagcgcaatagcctgatttagcgtgattttgtaggtcggataaggcgtttatgccgcatccgacatcaacgcctgatgcgacgcttaacgcgtcttatcaggcctacgccagacagcgcaatagcctgatttagcgtgattttgtaggtcggataaggcgtttacgccgcatccgacatcaacgcctgatgcgacgcttgccgcgtcttatcaggcctacgccagacagcgcaatagcctgatttagcgtgattttgtaggtcggataaggcgtttatgccgcatccgacatcaacgcctgatgcgacgcttaacgcgtcttatcaggcctacgccagacagcgcaatagcctgatttagcgtgattttgtaggtcggataaggcgtttatgccgcatccgacatcaacgcctgatgcgacgcttaacgcgtcttatcaggcctacgccagacagcgcaatagcctgatttagcgtgattttgtaggtcggataaggcgtttaccgcatccgacatcaatgcctgatgcgacgcttgccgcgtcttatcaggcctatcttaaccgttggttaatttttcaaactcttcacacccggtatcaaacccttccatacagctcaggttcaaccagtgcagcgccttttgcttgttcttctcgataaaaccttcttcaccgtttaagaacatcattcccgcccagtactcggaataaccggttcgggaaattgcagagctgcgtttgaaataccaggttgccttgtcatcgtcggccttaatgcccacgccgttggcgtaaatcaaaccaagcagcatttgggcatcgacggcagagtcgttctccagatcttccgaggcgttttctaacagcgaaattgcctttggataatccggtttacccgcttgagtatttaccagaatatgcgccagcgttacttcaccttctttactgcccgcttgcgccgctttctctgcaagaacttttgcttgtggatagtccagactgaccggattggtgattttgatctgcgccagcagcgcgcaggcatcagcatcaccgctgtcggcggctttctgtgcccaatattcggctttgctcaaatcgccggagctaaaccagctgtcggcaagaaaatattgtgcgcgtcggtccccggcctctgctgcctttaaatactggctgccaggctcggagtcgttggcgtgggcaaagaatgtcaaaaacaacatcaatgcgataatttttttcattttgataatacgattgggtagggagtaaccagtataaagagttcgaatggataaaaaaacagcctccgaaaggaggctgtagaaaggacggtattacgccagtgccgcttcgcgcaggcgagttttcaacttgttgtactcgtcaatcacgtactgctcggcggcgcgctgatcggcgatcggctcgacgcgaacggcgcagtatttgtactccggcgttttcgtaatcgggcttaagttttcggtaaccagctcgttacaggcaccaatccaccactggtaggtcatgtaaatcgcccctttgttcggacgatcgctgacctgcgcacgggtgataattttgcctttacgcgagtgcacccaaaccaatgcctcatcttcaatacccagacgtttggcgtcttcggtattgatttgtgcgtagccaggttcatcagccagcgccgccagtgccgcacagttaccggtcatcgaacggcaagagtagtgaccaacttcacgcaccgttgacagtaccatcgggtactcgtcggtgagtttgtcgattggcgctacccagtcgcaggtgaagaactgcgccagaccgttcggggtatcaaacttctctttaaacagataagaagtcccctgatcggcatctgaagtatcgcggcaaggccactgaatgaagcccagttcgcccattttctcgtaagtcgcaccgtagaaatccgggcacagatgacgcaactcatcccagatctcctgggtgttgttgtagtgcatcggataacccatacgggtggcgatttcactgatgatttgccagtccgttttcagatcccatttcggttcaaccgccttgaagaaacgctggaagccacggtcagccgcagtaaacacgccttcatgctcgccccacgacgttgacggtaaaataacatccgccgccgacgcggttttggtcataaagatgtcctgaacgataaccagttccagatcttcaaaggctttacgtactgccgacagctccgcgtcagtttgtagcggatcttcgcccataatgtacgcggcacgcacttcgccatgcgctgcgcggtgcggcagctcgctgatgcgatagccggtatgcgctggcaggctttccacgccccaggctttggcgaatttctcgcggttagccggatctttcacgtactggtatcccggatacgtatccggcagcgcgcccatatcgcaggcaccctgaacgttgttctgaccacgaaccgggttaacacccgcatgcggcttaccgaggttaccggtcagcatcgcgaggctggtcagagaacgcacggtttccacgccctggtagaactgggttacacccatgccccacaggatggcggcgcttttcgcctgggcatacatccgtgccgcctgacgaatctcactggcgctgacgccggtgatatcttcaaccgactccggcgtgtagccttcaacgattttacgatactcttcaaagccttctgtacgtgaagcgacgaacgctttgtcgtacagattttcttcaataatgacatggcccatcgcattcaacagcgcgatgttcgagccgtttttcagtgcaatgtgcatgtcagcaatgcgcgcggtttcaattttgcgcggatcgcagacgataattttcgccccgttacgtttagcgttaattacgtgattcgccacgattgggtgggaatccgccgggttgtacccgaaaacgaacactaaatcggtattatcaatttcgttaatagcattgctcattgcgccattaccgaccgattggtgcagacctgcaaccgatgggccgtgtcagacacgagcgcagcagtcaacgttattggtaccaataacggcgcgcgcaaatttttgcattacatagttggtttcgttacccgtaccacgcgaggagccggtcgtctggatggcatccggaccgtacttctctttgatggcgctcaggcgctcggcaacgtaattcagtgcctcatcccaggaaacaggttcgagtttgccgccacgctggcgacggatcatgggggttttcaggcgcggggtcaggatctgggtatcgttaatgaagtcccagccataataacccttcagacacagggtaccctggttggttttcccctgcgctgcctccgcccggacgattttgccgttatcgacgaccaggttgattttgcaacctgatgcgcaataggggcaaaccgtgacgacttttttcatcggtctcgctccagttaatcaaatcacgcatacgcgctctcgactacagtatgcatcttttatgccacattttatgtggggtcattccctgatattacgggcactatttattcaaaactctgacgaaaaacaggctgtcgtcagttttgacgtgacgaaacgaaataccgcgtgacagccatcacgcggcagacattttattttttctcgacgacgggacctgcctgatacccgccgcccagcgatttcatcaactgaatgctttggatcacccggcggctgtccagcatcagtaatgacatctcttcggcaagcactggcaaccgggcttcggtggcctgtaagcggctggttaagccgcgctgataggcggcctcggcagcgcgctgggtaaagcgcgtggcttccacgcgttcagcctgcatttctcgctcgtcgttgagcgtttgcagacgcgtgccgttgacggcaacgtcacgcaccgcgttcagtactgactggttgtaacgttcaatcatcatgttgctggcggcgcgcgtgccttcgagattggcattcaaccgtccaccgtcaaacagcggcaatttcagacccgggatgaagttgaactggcgactggtttttttgaataaggtatgcagatggatggagtccagaccgaaaaacgctttgatatcaaagctcggatagaacaacgcccgcgcggaatccacctgatctaatgacgcctgaacataccagcgcatggcttgcagatccgggcgtctggcgagcaactcataagagagtgtcgccggaatgccggtctggacttgcggtaatgccaccggtctgatctccggcatatcgctggctcccgcgccaatcaatgcacgcagagattctcgcgtttcggtgatttgccctttgacggcaacaatttgtttatcgaccgccagaatctgtgcccgcgcgccgtggaaaggcacttgcgcttccagaccgtgcgccactttactctggtgcgctttcaccgcgtaatcaatcacatcgtgagtttgttctaacagatcgagcatctgatagctggcctgcatactgtaataaagctgcgctacgcccgtggccagcgatagctctactgctgcggtttctgccagcgcggcattatgcgcgccaatggcggcggcaaccgctgagcgatgcacaccccacaaatcaagatccagtccggcaaacaaacctactgtggcttccgtatagtacggcccgtccatacccagtgctggcgcatccattgaataagggcttaaaaagccgttcgccgagacacgttggcggttgagcatccctaacgctgcgacctgtaattgtgaaccggcatctaacaaatcggcctgggactgcgctttttcttcccgcagtttcgcttcggcgagggtgtgtgaaccacttagcgtccgttggatcagcgcatccagctgcgggtcattgagttgtttccaccactgcgcctgcggccagccggagctggcaagatgaatatcgtcggccagtttgatttgttccggtttgagctgttgatgaggtgcagaatccttacgtaccagggcacagccggaaatcagcgtcgtgctgccgagaatgctgcacaacagcagacgtgaaagttgacgattgatcattgcgtggctccttgtgcctgttccgtggcgggcgttaatgccggggctgtccagtctggcaagcgggcgaaaagctggcagacgtgttgctcctgttttaataaggtgggcaggatggcctgagaggcgggtgtctcttcaagcgttatttgaggagaacggctgagtgcggttgccagaccggcagcgtatttctccagggcgtcggcaaactgacctgctctgtccggctgtagtgcgttatccagcgcctgcgccgagttccaggtggcatcccaggcgtgaagaagatcgcggccctgacgaataaccgtttgcgaacgttcaatcagtaatgcgcgttcttcgctgtccagttgacgctccagcgccacgcgttggcacatctcttcacaggcattaaacgccgcatgcagaccgatacgaatttgcagataagtgcgcagagccgtgacttcctgctggcgtgggatccgcattactttacttaacatacccagcgtgccagccagtttttgcggcagtgtgcgcgcttcactttcaggccagacaaaggtgtaaatcaccgcggacaccacggtaccaatgatgatacccagggcgcgatcgcgaatttccaccaggtcgtacactgggccaaaaacgttttcgagcgtggcgagcgcgaaggtgaccaccatctgtgtgccgatataagaagagcgttcagagctggtggcaatccatgcgcccaacaggaaaatcggtgccagcacaaacagcaattcgacaatattgtccagccagggcatgaccagtagcgtgaataacagcgccagaatcgcgccgcaaaaggccccgccaaaacgcagcaccatcttctggtacgacgaaccgacatttgggttagcgacgatcacgcatgtcagcatacaggtgtgaatgccttcccagtccacgccgctgtaaaaggtgtaacagatcaaacaggcgagcagcgtttttaccgcgtagcgcatatagtctggattggtaaaagcatcggcggccattgatggcggtttggctgcgggcgttggcggcgtattcgggtccatctgacccagttgtaacaacgtctggcagatattctccaggttacattcccgtgccgccatcgcttcactttcactgatccgccagtcgctttgccagcactgaccttcagcaacggcatgctgcagcttgttgatttctgaagctaatttttgtcggaattcaataattgcctgagaatcagcaaaagaggtgggatcgtagcgattcagcgtcgagtaaatgtaggttaccgttgccacgcagctttgccaccatgcgttttgagttcgccagttggcatcgtccgcgaggcaaaagacattgagtttttgtagcgccagcgcctctctttcaatccgcgtttcgggtagcggtgcgaggctgtctgtcaggtgactaatggcatcatcaagccgatcattaagcgcctgatgcatttgcgaaatggcacgactgggaaaccacagcacgccgattaacgtcatcagcaaggttggatagaggccaacaacgatacaccacagcgttaagcgcacgaccacttccggatagtcgagcatggcggggaaggtttgcccgtaaatagcgacaatggcgacggcgaaaaagaccagccccaagcgatgggtgcgcatcaaaaacatgcagcccatcaggatcggtccggcgatgatcaatcggatcaacggttcgccgtatgaccatttgtagatcaaaaacaggctgccgatctccagcaccgtggcaaccacaaacaagatcgcgacaaatttggtgtaaaacgcgttcgactgaataccgtaaaacagcactgccagcgataacgccacaaaagggatctcaaaggtcatcgagatcagaatcaccagcaggcagcctacccagagttgcacggtctgcggcacgcgacctggtcgccgctcgcttaactcttcatgaaagaacgccagcagcctgaccaccggtaatggcagggagttgagcgcgctcattattgcggctcaagattagcgactgccgaagcgccgatgcggaacatttccgggtcaggtttatcgaccatgattttgaccggaaaacgctgggcaacgcggacccagttaatagaacgagacactttcggcaggccgcccagcaccaggccgccgtcatccggtagcacgccgtagccaatcgaatccactttaccctcgaaggttttgccgctgtcactcatcaggcgaatcgttgcgggtgtacctgagcgaatatttttcagatcggtttcgcggaagttggcgatcacataccagtgacgagtgtcgattagggtaaaaatagggcgcatggcagaagcaaattgcccgacggaggttttgagggaaatgacccggccatcaaacggcgcgcgaacggtcgccatttccagatgcagtttggtcagggcaatatccgcttcgaccgccgcacgctgggcaactaatgcatccacgccgctgacggcgctggcggctgactgcgcctgtaacaatacggcattaagatccgcttctgcggcgcgctgcgccgttcttgcacggtcaacatcttccgctgagacaaaaccttctttcagtaatggctcggtgcggcgtaatgtatctgtggcctgtttcgcggcggcacgggctttttctaccgtggcattaaccgagtcggcaccaaactgttgcgcgtcaacgctacgctgggtgagcataatttgcttatccagcgccgcgagggaggcttcagctttcgccagattggcttcgtacgggcgcgggtcgatgcggaacagcaaatcgccctgtttgactgcctggttgtcggtgaccgccagttctacaatgcggccgctgacttccggtaccacatcaatggtatctgctgacgcgtaagcgtcattagttgatggcgcactgtctacgcgccagataacgaaaacaagggcaaccagcgccaacgcaaccactaacagagcagggaatttactgcgaggagcttttttcggcgtactttccatgagcgcgtctcaaatagattagaaaaatgccagccagaacagcatggcgtagagagcaaaaagggcggtataaataattccgacaaatgccagattgatatttgcccgctgaataactcgcctcgtgatgagcgtcaaaataaggctggcaatggcgcagaaaaaccagctgggataataagcgccgatcaccgggattgccggagataatgagcatcccgaaaccatgaagacgggaattatccaggctgtttttttgagttgcatcgccatgcgagagagaactgttggcatattaaatacatcctgtctgctgcgaacaatatctgtagtgaatatcaatatccattgaaggcgtcagtatggctattttcttgatgaataaaaatagctttattcagccaccgcattcataacttatatattttatttattaattggctgtatatatttttaaaataaatacttttgggggcttcagcgcccccaaaagcgagtgacattaatttggggttacgatattcacccacaaatcgaaattatccagacaggcgataatttcttccagtttcgcgccattgccaataattttggctttcttcgcttttaccagatccgccattttggcttgtccggtcagcacggcgtgcagatcttcacggctgatgtagaaagaggcgtcggcttgcggttgcagcgttttccggtagttaagcacgctatcgttcagcgtcaggttgaggttatcgccgttgctcatattgaagttcaggctgatatttttacccgcagctttcgcgctatcgaggcgaacggccataaagtcgaacagcatttcgaccgacatcccgcgaatggtgtccggggaaccggtggtgccgtggctgaacttatgcaccccttcgcgcagctctttcgcgccggtcaggtagaaaccgcgccatgtggcggactcggcctgatagcccagctgttcaaagttattcgcttgcagattcttcgcgacctggtcacccgggttggcggcaatcacctgtttcagcagttctgccgaccagcggtaatcaccttgcttgttcgcttcttgcgccaggttgatgacacgggcagaaccgcccagcgcctgcacgtaacgtttacccatctccacctgaccatacggatgcaggttagccgggttaccgtcgtaatagccaagatagaagttatacaccgcgcgggcgttgtggctgacagaaccgtaatagccgcggctggcccagttattggcaagtgcaggcggcagcttaatcatgtcgccgatttcattcatggtgtagccctggttcgccaggtgcagggtctggtcgtgaatgtacttgatggtatcgcggtatttaccaatataatcattgatatgcttattgccccagaccggccaggtgtgcggcataaacagcacttccgcgtcgttaccccacatatccagcgtttcgttcagatactcggtccacttgctggtgtcgcgggttttcgcgccgcgcagagtgtagaagttgtgcagggtatgcgtggcgttctcggcggtacacagggctttcagggccggaatatagaagtgcatttcggctggcgcttcgctacctggggtcatcaggaagtcaaactccaggccgtcgataatcatcttctcgccagttctgacgatagttttcgtcggtgcaataatgctcgggtcgcccgttgccagcgtcacgccaaggccattacccacattgccttgcgcgttgtgcggcagtaacagaccgtaagagtagagcgcacggcggctcatgatgttacccgccagcacgttttcgctgatggcttcgtccataaagcctgcaggggcaatcacctgaactttgccggatttaacatcggcttcagagataatgcctttcacgccaccatagtggtcggtgtggctgtgagtgtagataacggcaacaatcggtttttgcggacgatgctggaagtaaaggtcaagtgcggcttttgcggcaggcggcgtcaccagcgggtcgataacaataatgcctttctcgccctcaacgaacgtaatgttagagatatcctggccgcgcacctgatacattttatcggtgactttgaacaggccagaaataccgttgatttgcgactgacgccacaggctggggtttacggtttccggcgctgcggcattaatatcaaatttgtaatcgtccgcgcggtagtaaactttaccgttcgcatcacgcagaataccttcatccagcagcggggcgataaatccacgctgggcatcgtcaaaatcctgacgatcgctaaacggtaatgatttggcgtaattctgattaacctgttgggtatattgagtggcggctttcgcttcctctttcgcgttagcggtatttaccatcatgccgctggcggcagttaacgcaataacaatcctgctcaaacggaataaccgagagttattcatataaatctccatttatcatttatgtcgtaaatatgtaatccatgcaaaatacgtcatttaaagctggcgttatcataattgggaaattgcgactttaataagtggaagtgtgagcggaacgcgccattttattaggcatttgtgctgaagagggaaaattacagtaaaactatcattgcagaaaataatatgagtcgttttatgtgtttattatatatattgtacctgtcgttggcacagcgggacattgcgctactgtgccaacgttttactcatggggctttagcacagaactgtggcaaaaaacgttgatgcgccaatattgctgcaccctgagcgccattaaagtcagaagatgaggcggcaataaagcgcacgacctgatgcggcagtggacggcgcaggtacttttgggtcatggcaacgagagtctcgcgtgggaaggcgggcatatccatcacgccaccgcccaggatcaccgcatcgggatcgaacagattaatgctggtggcaatggcccgtgccgcgttttcaagcagactctggacgaaaggggcgttttccgcatggacgaaaagatcgcgcaatgggtaatttcggggctgttgttcgtaccagcgtcttagcgccattccagagcaattggtttccaggcacccaggattgccacacgcgcagtgttgggtcatatctcccagggggatatgacccagttcgcctgccacaccgtgtgcacccgtccacggcgcaccgttcatccacactgcgaaccccatccccgtaccgagataggccgccagaaccagttgttgcgtaaggcggttttctactacgtcccaggagagttgcaggttaacgtcgcgggaaaactcaaccggacaattcagcgtattttcgagcttatcggcgagatcatataaatccgccgctgttaacggcaggttaggcgtagaaataatggtgcgtttatctttactgaccagcgccggaaatcccatcaccagaccatgacagcgagcgttaaagcgcctgagttgctcgtcaatcatttcgccgatacccgacaccaggccgggagcaatgacttctgcggtccgctttttttcgcagtgtagcgtttcaccttctgctgtccgcagacaaaagcggatatgcgttgcccccatatccacgcccgctacgacgttatgctgtttttgcatgaggctgtacctcgctttttgcagccagaatctgcgcggtcataattctccatgcttcgtcgatattttccgcatgattaaacaggccggaagtgccgacgataaagacatccgcccctgccgccatcagtttttcgtaagttgcctggttgcaggaaccgtccacctcaatttcgtactccagaccttctcgttcacgccatgccttcagttcggcaagtttatccagcatttcaggaatgaacggttgtccggcaaagccgggatcgacagtcatgaccgtaattttatcggccttatggatatagtatttcatggcctcaactggcgtctccgggttaaggatcagccccactttcatgtcatgacggcggatttcatcaatcaggcggaacgcctggccgttgatggtttccggatgcagagtgatgaaatctgctcccgcacgcgccagttgagcaatgtaatcctgcggccgcgtcaccatcagatgacagtcgagcggtttagttgccagttttttaacctgacttacgaagaacggtgagagtgtcagattggggacaaagtgaccgtccatgatatcgatgtggaagtaatcggcatggctgtcgataaattcgatctgttctttaaatttcagcagatccatacacattaacgagggggagattttcatgttcaattccttacttactgataagacggtcaagggcgacagccgcgataattaatccgcccatcaccaccagttggtaataggtttgtacctgcaaaatattcagaccgttgttgatggtgccgatgatcaacccgccaatcaccacagagaaaatgcgccccttgccgccgaagaaactggtgccgccaatgatggcgctggcaatggcataggtttcaaaacccataccggcaagcggttctgcggcaccgagtcgtgcagttgagacgacgcctgccagacctgcacaaacaccggagatgataaacaccaccaggatgtggaatttcacgtcaatcccggaatagaacgccgaatttttgttgccgcccagtgcgtagatgttgcgcccgagccgcatacgcgttgtcagaaaccaaaggatgagcgcgacaattagtgagaagataacggggacaggtatcccaattacgctggcggcaaagaagttcacgaagtcaaatgagaagccgtataccgagttggcatcggagatcaccagcgtgatcccacggaaaatcgcgttggtgccaagggtgatgatgaacgggtgtagccccgtccagttgaccaggcagccgttgatcgcccccagtgcgccgccaaccagtacaccgccaatcatcgctgcgagaaacgggtcaacacctgccaacatcagtttggcggtcaccataccggaaagcgccagaatcgcgccaaccgagaggtcgataccagcgaccaggatagcgaaaaactcgcccatgccgatcaataccgtcacggagctttgaacaaaaatctgggtaatattattggtggtcagaaaatattctggtgacagcgaaccaaagatggcgacgatgatcgccaggataaaaaaggtgccgtatttatcccagaacagcgcaaagttgaacggtttcttctcgctcgcttcgctttttactcttgtggtaaagcccatgccataatctcctcttcgctcatgtcatcgcgattcgtcaggatttgcgtcagtcgtccttcgcagaacacggcgatgcggtcgcagacggtgataatttcaggtagttcagatgacaccatcaggatgacttttccgtcgtccgccagttggcgcatcactttgtaaatttcggctttcgcgccaacgtcgatgccgcgggtaggttcatcgaaaataatcacttccgggcaacagcacagccatttggagatcaggactttctgctgatttcccccggagagttcggtgatattctggtttaccgaatgacatttcagcgccagcagttcgcgttgattttcagcggtacgttgctcgtcaacttcatgaaacaagcccatcgcgcctttatagccgccgtctttcagactgcggctgatcgccatgttctgagcgatggaaaagttggggaaaaaaccgttatcccggcggctttcagtgatgtaagccatcccttttttcacggcatccaggggtgaacgtggagagatatctttgccattaagacggatttctccgccagcgcgtttatccacgccaaacagacaattcatcagttcagtacgtccggaaccgaccagtccggcaaagcctaatatttctccccggcagacgctaaatgagatatcccggaccttttttctgtcacgactggtgacgttccgcacctcaaaaaccgtttcgtgcgcaaggttgctgacattctccttcatcgcgttaaaacggttttgcagttcgcggcctaccatcagacggacgatatcgtcatttgacacatcgcttactatgccgctgcaaacgctgctgccgtctttcatcaccgtatagcggtcgcaaatacggcgaatttccgccaacttatgcgagatatagacgatggccgtaccctctttacgcaactgattcatgatcagaaacagatagtccacctctttattggtgagtgaggaggtgggttcatccatgatgatgactttggcatcgagcatcagcgttttggcaatttctagcatctgcttgtggctgatagataaattcgccactttctcatctagatcaactttcaagcccacgcgtaataacatcatggcggcgcggacacgcatttctcgccagtcgataatattgacgccacagatttttttcgtcagatgacgaccaatatataaattttccagtacggttaattcatcaataacgctgagttcctgataaataatcccgataccgagttgtgccgctaatttatgatccagcttgttatagctaatgttattaatggtaatggtgcctttggtcggctcatgtattccggataaaactttcattagcgtggatttacccgcgccattttctcctagtaatgcatgtatttcaccaggataaaccgttaaattaaccgactttaatgcgtgaaccggaccaaaggacttgccgatccccgccatcgatatatatggcgtggccataaataacctctctgcacgaaatatcgtattattgcctgatggctacatttatcaggtctacgttcaggttattttgttggccggataagacacttcattagcatcatcatccggcatcattcagttttattgagtgaccaggattgaatcgaccagtttaaattccggtgctttatccagcgggataaccttgccggatttctcagcgtcaaccatcagcttcagacccgttgcgccgatatccgccgggttctgggcaaccgtcgcggtcatttgtccggcttccaccattttgcgggcttccggaatgccatctgtaccgacgaccagcacttttcccgtttttccggcgtttgcgactgcctgagcaacacccattgccatcgtgtcattcgcgcaatagatcgctttaatattcggattacgttgcaacacgttagtggcgacatccagtgctttaatgcggtcccagtcggcaggctggctggcgacaagcttgatctggcttgcttttttgaaggcttcggtggcaccattacgacgcgcttcaccggaggcgttaccggctttaccctcaatgattgcgacttcaccaccttcagcgcccaatttgtcaataatgaacgacgcgcctttcgccccgacagcaacgttatcggtggtgacaaaagcttccacattgccgccagcttttttcagattatccatgtcgattttttcatcgagattaaccagataaatgccttttttccatgcgcgggcgacaggcatgaccagattcactgaggataatggagcgaaggcgatacctttgtaatttttattactgagatcttcaaataactgcaattgagattgaaaatcgccttctgaaggagaggcaaaaatatcaacgctgacgcccagtgtttttgcttcatcttcaatgccttttttcatatctacccaaaatgggttggagagggttttcaatacgacagcatattcggcggcagcaaaagcgctggttgacaacattaagcccacgagtgtgccgctgaaatatttcagatatttattcataataatgttctcacggtaaggggacaggtaactccgcgatggcggaattacctttttcttatttcagcgcgcctggtgagaagaaatcaacaattgcgccggttttttgcatattaatattagcttgttcaatgttgagctgggcgacagagacaaaaaaagcgtccagcaaagttagttgtaatattcttgccgaggcattacgacctaataacggcgtttccggggctggtgagcaaataatataatcggccagtttcgctatcggtgaatggtagctatgggttatacaaataatctttgccccgttcttttttgccagttctacggccgcttttacatcactggttcgcccggaatgggtcactaccagcacaacatctccttcctgtaacaacgaagcggacatcatcatgatgtgagcatcaggataggcctgacagcgtacgccaatgcgcaagaacttgtgctgtacatcagcacagatagcatttgatcctccggcaccgtacaaatcccgctgtctggcctgatagaaaaagcgggcggcacggtggatctcatcaacgttgacgatcgactgaccttccataatggtgcgtaaagtgatgttaaataccttattcaccacatcctgcggcgcttcatcaaaagccaactcggaaggcaatacctgttctgactgagaaaaataatcttccagcgcactgcgtaagttacgaaagccgctaaaccccagcagctttgataccttaactatcatcgcttcagataccgccagagcttctgcgacatctttaattgcgggtgcacaactcaggttaccgggtttgagtaaccactccacgatgcggctttcattttctgtcattccttcctgcttcattcgcaggtaaggcgctaaccctataccgttcggaagcgctgaatcaaactctgactggctcatcacgttctcttgtccttgaattgaagacgccactatatcaccacagcaagaacagaaaagatgctggcgacttcacaaaaaaataaaatttataaagtttattttattgtgaacaatggcgagtggcttaaaattttatttcatttaattagtttaaaaacatgatgttatttgtttttctggttttttagatgatagatgttgctggatggtgagtgtctttaacgctattgcgctgtcagatgtaactctgtaaaacagatcaggaaggcgtaattcatcgattttgggtgtttttaattcattaacatcacaaatgttttttgattgtgaagttttgcacggacggggaagatgaatgaaaaagattgcatttggctgtgatcatgtcggtttcattttaaaacatgaaatagtggcacatttagttgagcgtggcgttgaagtgattgataaaggaacctggtcgtcagagcgtactgattatccacattacgccagtcaagtcgcactggctgttgctggcggagaggttgatggcgggattttgatttgtggtactggcgtcggtatttcgatagcggcgaacaagtttgccggaattcgcgcggtcgtctgtagcgaaccttattccgcgcaactttcgcggcagcataacgacaccaacgtgctggcttttggttcacgagtggttggcctcgaactggcaaaaatgattgtggatgcgtggctgggcgcacagtacgaaggcggtcgtcatcaacaacgcgtggaggcgattacggcaatagagcagcggagaaattgagattcatccactacttgcatggatgagtaatgattaatgtggatagagtttctttttgaggttggctaatgaaacgctttccgctatttcttttattcaccctgctcacgctgtccacgttccggcccaggccgatattatcgacgacaccattggcaatattcagcaggcgattaatgacgcttataaccctgaccgtgggcgagactatgaagattcgcgcgacgacggctggcagcgtgaagtgagcgacgatcggcgcagacaatatgacgaccgccgccgccagtttgaagatcgccgcaggcagctggacgatcgccagcgccagcttgatcaggagcgtcggcaactggaggatgaagagcggagaatggaagatgagtatgggcgatgaggttgggtatggagcaggcatcgcccctcaccccaatggggagagggagaaaacgagcgcaatattcaatatcgagcacaatcggtcccctcgcccctctggggagagggttagggtgagggggccagcgcgcacattccctctcatcacgccaccccaatctccatcccatcaaaccccacctcaaaccctgacggtagtgcgttttccatcagccacgcatcaaactggtggctgatatgggtcagaatcacccgtggcgagcggataacctgattcagcgcaagcacggtatttaaatcacagtgattacgcggtgcatccgcgcgcggcgggtgactgcaatccatcaccattacctgcggctgattattgcgtaaaaatttcagcgttttttccggcaagcctgcggtgtcagacagccacgccacccggctgtgtgccgtttccagcagataaccgaaggtcagttttgagtggttgagcggcaggggcgtgacctgtaacccctgcaaatcaaacaccacaaacggttccaccgtgtggctgaaatcaagcaggcccggatgtttaaacagatcgtcgcagccctgttcatccggcgggccgtaaaccgggatcggatcgccaacgccccagcgcagcggaaacagcccctggacgtgatccatatgataatgcgtcagcaaaaactgctggaacgatccgggcgaccagcgatcggcgagatcgtgcagcccggcgtcgatcagggtgattgcgtcgttaaacttcactacgccgctgcacggttggcggcgatactgcggcgagcgccgcgctctggcgcaggccgcacactcgcagccccatgccggaacgccctgtgcgccgccggtgccggtgagcgtgagggtcaggctcatgttacagcgccttggtgaagcggaagtggctctgctcgtagccttcgcgcagatagaaacggtgcgcgtcgtggcgcttcacgttggtcgaaagttcggtcatttcggccccggcctggcgggcttcttcttctgcccacgccagtaacttactgccgacgttcagaccgcgcgcctgcggcattaccaccaactcctgaatttcgccgatccagttgacatgatgcagatgaaactgcaaatgcaggccgatcatgccgacaacttcgccatcaagcagcgccagatggtagcgcatgtttgggtcgcgcagattggcgttaaaacccacgcgaaacgcgtggtggtcaaactccgcctgttttagctcacaaatcagcgcgtaaaccgcgtcggtgtcgtactgcgtggccgggcgaagctcacaagcaggcatggtgtttctccttctgatggatcagcgtcagcagcgtgtcgaccgactggcgcaggctgccgtcattgttgagcgtatggcaatcctgtggagtatagcgggcggcgcgcgccaggcgggcgttaatttcactggcgttttcacggccacggttttccaggcgctggcggaggatctccggcgaaacctgtaaacagacgggcagcagcgccgattgatagcgcgcccgcgcctgcggcagatgggcgcgtgagccgttgaccagcacgtcgaatccggcgtgcagccagagatcaatctcgacgccgacgccataatacagaccgttagcgtgccagcttaaggccaacagattttgccccgcgcgggtaaaaaactcctgctcgctcagggcgatatggttttcacttccggcgctggcatcgcgcgtgatgtagcgatgcgccaccagtaactgagtttgttcccgcaggcggagttccgccagcaggctgtctttcccggagccggacggccccattaaccaaatcagttttcccatcatcagaacacccttttaccctgacgccagacgtggtcgatatgaatatgattgtccttgcgatgcgccagcaccaggtcggcgcgtttgccctcgccaatcaccccgcgatcctggagattaagcgcctgcgctggatttttagtcaccagcttcaccgcctgcggcagcgtaaagcggttgctctggtcatcggcgacgcgaaatgccgcatcgagcaggctggcggggtagtagtcggaagagaggatatccagcaggccaagctgcgccagttcactggccgccacgttgccggagtgcgagccgccgcgcacaatattcggcgcgcccatcagcacgttcatgccatgcttgcgcgaggcttccgccgcttcgaacgtggtgggaaattcggcgatcacgctgccaagctggtgagattcagcaacgtgggcgtgggtggcgtcatcgtggctggcaagcgcaatttttcgcgcgcggcacagggcggcgatggattcgcgattcggctgcgaccagcgtgcggcgagcgccagttgctcttcttcgtactgctgcatctgcgcatcagtgagggagtatttgccctgataatattcgcgatacttctcgcggttggcgaactggcgctggcccggcgagtggtccatcagcgacaccagcgtcaccggctcgcgctgcaccagtttttcaaacagcggcagcgtggtgtgatgcggcagttcgcagcgcagatgcagacggtgctcggcgcggttgacgccgcgtttctgcgtctcttcgatggcgttgatcatcttctccagattctccagccgatcgccgccgtcgcgcacgtcgccaattgccacggcatccagtacggtggtgatgccgctcgccaccatcagcgcgtcgtggctgctcatcgccgagtgggcaggccagtcaactttcgggcgcggggtgaagaatttatccagattatcggtatgcagctcaatcagccccggcagcagccagccgccttcgccgtccatcgcctccggcaggcggctctggctttcggcaaaggcgcggatttcgccgttctgcacctccagcgaaccgcttaccacctcgttttccagcaccagcttaacgttattgataatcatgaagaggctcccattgggtgcaggcggtcggcgacgtcattacgtacagcttcgtcatggaagatgcctacgatggctgcgccacgggttttggcttcgcgaatcagttccaccaccgcggcgctgtttttggcgtccagcgaggcggtaggttcgtcaagcagcagaatggggtagtcgacgataaagccgcgggcgatgttgacgcgctgctgttcgccaccggaaaatgtcgatggtgccaggtgccacaggcgttccggcacgttcaggcgggtgagaagacgcgcggctttagcggcgcaggcttcacgcggaacgccggtatcgagcagcggctgcatcaccacttccagtgctgagatacgcgggatgacgcgcagaaactggctcacccagccgacggtggttttgcggatttccaccactttgcgcgctggcgcggtgaccaggtctacccactcgtcaccgtgtttgatctggatttgaccttcgtcgggcagatagttggcgtacagcgagcgtagcagagttgatttgccgctgccggaatggccgtggagcaccacgcattcgcccgcgttgacggtgagcgaggcgcgattgaggacgggcaggcgcacgccgttttgctggtgcaggatgaaggttttactgacgttttgtacgttaatcatttttcgcctcgtggttcgggtgtcggatgcgacgctgacgcgtcttatccgacctacggggagcgcatttgtaggccggataaggcgtttacgccgcatccggcaccggctcaattctgcaaaaccgatgacaccagcagctgtgtatacggatgatgcgggtcgtcgagcacgcggtcggttaacccactctccaccacttgcccctgcttcatcaccagcaaacggtccgccagcaggcgggcgacgcctaaatcatgggtgacaatcaccaccgcgaggttcagctccaccaccaggccgcgcagcaggtcgagcaggcgggcctgcaccgacacatccagcccgccggtcggttcatccataaacaccagcttcggatgcgtcaccaggttgcgggcaatctgcaaacgctgctgcataccgccggaaaaggtggtcggcaggtcgtcgatccggttggcgggaatctccacctcttccagccacttctgcgcggtggcacgaatatcgccgtaatgacgtgccccggtcgccatcagccgctcgccgatattgccgcctgccgacacctggcggcgcaggccgtcgagtggatgctgatgcaccacgccccattcggtacgcagcaggcgacggcggtcggcctcgctcattgcatacagcgaacggttctcgtagtgaatttccccctgctgcggcgtcaggcgcgcggagatcgacttcagctgcgtggtcttcccggagccggattccccgacaatgcccagcacttcccccggccataaatcaaaagagacatcgctaaagcctttgcccggcgcgtaaaggtgggtcaggttattgaccgaaagtaacggttgattcattggttttttgcctcgctctgttggcggcaataatcggtatcggagcagacaaacatgcggtttccggcgtcatccagcaccacttcatcaagatagctgtgggtcgatccgcagatggcgcatggctcatcccactgctgaacggtgaacgggtgatcgtcgaaatcgagactttccacgcgggtaaacggcggcaccgcatagatgcgcttctcgcgccccgcgccgaacagttgcagggcgggcatcatgtccatttttgggttatcgaatttcgggatcggcgacgggtccatcacgtagcgcccatttaccttcaccggataggcgtaggtggtggcgatatgaccgaagcgggcgatatcttcatacagtttcacctgcatcacgccgtactcttccagcgcgtgcatggtgcgggtttccgtttcgcgcggctcgataaagcgcagcggctcggggattggcacctggaagataattatctgatcttcggtcagcggcgtttcggggatgcggtgacgcgtctggataaccgtcgcatcgtccgtacgttccgtggtgtttaccccggtcacgcgcttgaagaagttgcgaatcgacacggcgttggtggtgtcatccgcgccctggtcaatcaccttcagcacgtcgctttcgccaatcacgctggcggtaagctgaatgccgccggttccccagccgtacggcatcggcatctcgcgcccgccaaacggcacctgataaccggggatcgccaccgcttttaagatggcgcggcggatcatgcgtttggtctgctcgtcgaggtaggcaaagttgtagccgctcagattagccatggttctgctcctgttgcagacgtttgagtagctccagttcggcctggaaatcgacgtagtgggggagtttgaggtgtgagacaaagcctgcggcttcgacgttgtcggcatgtgccagcacgaactcttcatcctgcgccgggcctgtcgcgtgctcgccgtactccggggcttgcagagcgcggtcgaccagcgccatcgccatcgctttgcgctcgctcatgccgaacaccagcccgtagccgcgcgtgaagtgcggcggctcacccggcgggtcgataaaaccgttaaccatttcacactcagtcatcagcagttcgccgacgttcaccgcaaatcccagctcttccggcacaatcgacacgtcgatatagccgctgcggatctcgcctgcgaacgggtgattgcgcccgtaaccgcgttgggtggagtaggccagcgccagcaaatagccttcgtcgccgcgcatcaactgctgcaaacgggaggagcgtgagcaggggtaaaccggcggcgtgcgggtgatgtcatccggctgtgcgccgctatcctcttcaaacttcgccagcccctgacgcgccagcaggctgaaaacgtgcggcgacggctgctgttcgctgtcggcggtggtcagcgtcggcgcttcgccgtttgccagcagggtaaaatcgagcaggcgatgggtgtagtcgtaggttgggccaagcagctggccgccgggaatgtctttataaacggcggagatacggcgttcgagacgcatcccggtggtgtcgagcggctcgcttaccgccagcttcgccaacgtggtgcggtaggcgcgcagcaggaaaatcgcttcaacgttatcgccgctggcctgtttcagcgccagcgccgccagttcgcggtcggcaatgccgccttcggtcatcacgcgatctaccgcgaggttaagctgctgttcaatctgggcgacgctcagttcgggcaaatcggtatcgcctcggcgtcggctctcttgcagggcgtgggcggcgtcgatcgccttctcgccccctttcacggcaacgtacatcagcacacctccacatgagtggttcgcggaatagccagcaggcgctcgccacaggtcaggatcaggtcgatgccgagcgggaacggatgcgggcgctcggtgagttcgtgcagaatgcactccggcagctgcggagcgatcattcgttcttcggcaatacccgcaccagtaaggcgcaacatgcgtccgccgctcaggctggcgacctgtaaaatcagcgtcgcacccgcttccggcgcaacggcggtgccggtggaaagggcgttgagctgttcgctggaaatcgcctcatccgtcaccgcgaaggtcgcctgttccggctggctgaccagcggcgcgttggtatgaaaacgcaggctctggttgacgatatcgttatttaatggggtagaaagccacaccggcgtgtcgttatcggccagcgtcagcagcacgctggtggtggcgatattcagcggttgccagccgcgtttgagctgatgcagggcgacaatcacgcccggctcgctcatggcctttaacaggcgacgaaaactgtgctgggcatcctgcacgggaagcataaaagcggtttccagggtcatgcgttgtctccgcgaaccatcgtaaagaagtcgacccggctggcgttcacttcggcctggcgtgcggcaatgcgtgccatacggtcagcgtccagcggggcaataagggtttctgataagttttgaaagtggcgagattgctgcatcagcgcgtcaatcagcgcgcagcgttcggcgtgctgtttatcacgcccctgcacccagctgtagccgagcgtgccgtcagtcaggcgcacggcggcgcgggtcagcgtggcgtcgccggcaaaaaaacgttcgccggtgccgcccatccgcgcctgaatctgtaccaggccagtttcagcggcgcggatcacctcatagtcggcggtgatgtttagcgcgttcaggcgtgctgccagttcagccggttggctgtgcgccagcacggacatccagtgctggcgggtcgcggtatctgcgtgcattcagtgctccatagtgaattcaatcatgtcggcgcgcgtcaggctgacggagtactccgccgggctgctttcaccgtcacggtggttaagggtgcgcacgcacagcagcggcgacatattcgggatttcaagacgctggcactctttggcctgggcgcggcgggcgctgatccgcgtctggctgcggcgcagcgcaattccggtttgctcgcgcagaaaatcgtgcagcgagccgctgtcgaagcgttgcagcgtcggccagagggtgaggtccgcgaagtagtggtcgattaaacagagcgcgacgccgttgacacgacgcagggtgcgcaggtggatgacgttctccccctcggtaatccccagtgcgtcagcgacgtggccggacgcggggcgcaataccgaaagcagtttttcgctggtgggatggctgccctgatccagcagattctggctaaaacgcgcctgggcgttgagcgggtaatcgaacgggcgcatcagcaccagcacgccgacgccctgacggcgctgtacccagcctttttccaccagttggtcgatggcgcggcgcagggtgtggcgattcacctcaaagcgcgctgccagttgctgctcggcgggaagatagtcgccgcagcggtagtgttgacgaagctcctgctcaagttttgcggctatctcttgatagcgtgttgggtagctggtcggatgtgtagacaagtgcatagatatcaatgcctcgcttatcagataaagtgcttacgcaaccgttgagagaggaaatccagcaggctgaccgtgacgatgataagcaccatcagggcgcaggtttgttggaactggaaaccgcgaatcgcttcccacagggtgacgccgatcccgcctgcgccgaccatgccgacgacggtcgccgagcggacgttggattcgaagcgatagagggagtaggagatcagcagtggcatcacctgtggcagcacgccgtagaggatctcttcgagcttgttggcaccggtggcgcgaatgccttccaccgggccgggctcaatcgcttccaccgcttcggaaagcagcttggagagcacgccggtggtgtggataaacagcgccagcacgccagcacgccagcgaacgggccgaggccgacggcgaccacgaacagcatggcgaagaccatttcgttaatggcgcggcaggcgtccatcaggcggcgaacgggctggtaaacccaccacggcaccaggttttcggcgctcatcaggccaaaggggatggagagaaccaccgccagcgcggtgccccagacggcgatttgcagcgtgacggccatttcggtgaggtaatcctgccactggctgaaatcgggcgggaagaagtcggcggcgaacgtcgccatgttgccgccgtctttgatcagcgtaagcggggccatttccgcgccctgccacgagacgaccaacacggcgagtacaacggcccagctcagaagcgagaaccagctgcgcttgggtggggcgatggtgatggtttgcatgtttggctccggtctgtaggccggataaggtgcttgcaccgcatccggcatcaacgcctgcacattgtcggatgcgacgccggggcgtcttatccgacctacgatttactgcaccgctttactcaccgaactcatcgcgcttagcgcgttgttcaggcggtccaggtcatccagctgcgcctgaatctcggtggtttttgccagcttgtcctgctcattcagtcctttattgcttttcacgccctgcatctctttaaacagcgcgagctggcgaatcggcaccagttgcaggtcgctggaagcgcggaatggcgcccagcccaggcgttccagcaccgctttttcttccggcgttttgccgtagttcataaagaagtcgtagatcttgtctttggtggtttcggaaagattcttgcgccagacgatcggatcgcctgggatcagcggcgacttccagatcaccttcagttctttcagcttctctggcgcggaggttttcagcttgtcgaggttttcggtgttgttggtggcaacatccacctgcttgttggcgacggccagcgcgttggtttcatgcccggcgttgacggtgcgcttgaagtcgctggcggagatattgtttttggcgaagacgtagtagccggggacgaggaagccagaggtggagttaggatcgccattgccaaaggtgagatctttccgcttcgccagcagatcgttcaggttgttgatcggactgtctttgttgacgatcaacacgctccagtaacccggcgatccatccgccgcgaccgtctgggcgaagacctggccattggcgcgatccaccgcttccatcgccgacagattgccgtaccaggcgatatccactttattgaagcgcatcccctggataatgcccgcgtagtccggggcaaagaaggcgttgaccttcacgcccagcttcttctccatatcctgcaagaacggcgtccattgcggtttcaggttttgctgtgattccgttgaaataatgccgaaattcaacgccttttcctgctcttcggcgtgcgccgggcttaacagggtgctgaggctgaacatgctggtgaaggccagcgaggcaattatcttagcgttcattcgttttcctcaatgatggggatgtcaggcagctttcgcgttctcttcgacgcggttaatgctgcggtagagatggtcaaaacgttcgttatcaaactgttggctgctgccgtcgtagaagacgtgcccctggcgcagggcgacgatgcgttcgcagtagcgcagggcgtaatccacctgatgcagcgtgacgaccacggtgatgccgtcgttctggttgatgtcgcgcagggtgtccatcacgatgcgcgctgattctgggtccagcgaggcgatgggttcatcggccagaatcactttcgcctgctgcatcagcgcacgggcaatcgccacacgttgctgctggccgccggagagggtggaaacgcgctgatgggcaaaatgcaccatgccaacgcgggtcagcgcctgtaacgcgcgctgtttctgctcgccggtgaaccagctaaaacaggtgcgccagaacggcgtgctgccgagcgcgccaatcagcacgttctccagtacgctcaggcggttcaccaggttgaattgttggaatatgtagccggtatgggcgcggcttttgcggatatcgcgggccaggcggccttcgcgctggactgtgcggcccagcagctcgatatggctaccgacagatttatcgccggtaatcaaaccgcttaagtgacgtaaaagggtggattttccggaacccgacggcccaagcagagccaccatttcaccgtgatgaatgttcagatcaaccgcatgcagcgcctgatgctgattgaaggttttggcgagcttctcgacacggataatcgtttgcatgatgcagcctccctaaaaaagtggctccatcgtggcggattattgtgacgatttggttaattaaaagtgactaacagatgaagagttaacgggaattcgatgacagtgcgggagggcgggcctcccggcgggttattgcgttggttgttgtttgacgacattaatcatccacggtacgccaaatttatcggtgactttgccaaagccatgcgcccagaaagtttcctgccaggccatttcgatttttccgttagcggcaagattgtcaaaccagcgttttccttcttcgacctgttgcgaatcgagcaccagcgtaaagccggagtagctggcttttcctgacggcatggcatcgctcatcatgatgtcgcttccggcaatgcgcacattggcgtgggcgatggcggtatcgggaaattgcattccggaagggcagttctcggcgctgtcctgcgctgattttggcatttcgccgaagctgattttatagagcagttccgcgcccaacgtacgttgataataggcaatcgcgtcggaacagttaccggcaaaagagaggtagggacttaacggcatgatggtgacctcagttaagagaagccagttaagtgtagttcgaaatttatacagatgagaggcggcctgataagacgcgcgagcgtcgcatcaggcagtcggcactgttgccggatgcggcgtaaacgccttatccggcctacggagggtgcgggaatttgtaggcctgataagacgcgcaagcgtcgcatcaggcagtcggcaccattgccggatgcggcgtaaacgccttatccggcctacggagggtgcgggaatttgtaggcctgataagacgcgcaagcgtcgcatcaggcagtcggcaccgttgccggatgcggcgtaaacgccttatccggcctacggatggtgcgggaatttgtaggcctgataagacgcgcaagcgtcgcatcaggcagttggcactgttgccggatgcggcgtaaacgccttatccggcctacggagggtgcgggaatttgtaggcctgataagacgcgcaagcgtcgcatcaggcagtcggcaccgttgccggatgcggcgtaaacgccttatccggcctacggagggtgcgggaatttgtaggcctgataagacgcgcaagcgtcgcatcaggcatctggcaccgttgccggatgcggcgcgagcgccttatccggcttaccgatcacaatacaatcagttctttttcacaaactcagatttcagtttcatcggaccaaaaccgtcgattttgcaatcgatgttatggtcgccttcaaccaggcggatgtttttcactttggtgccaattttcagcatcgaagagctacctttcaccttcagatctttaatgatggtaacgctgtcgccgtcagccagcagattgccgttagcatctttaacgatcagctcgtcgctttcctgtgcaggttctgcgtcgttccattcgtaggcacattccgggcagatgtacatgccgttatcttcgtaggtgtattcggagttgcattttgggcagtgtggtaatgacatgtggatttcctcaaaagtcagcagggcaaaagcgccaaaaaacggcagattgccgaaaaaggccgcaattatacacaaaatccctgagtttgtcgggggtactgctgattttagacgacgatcgttttcatttgaaaggaaacgcaaaaagaaaataatctttttgcctctatttattatttaagataatgttaatgctctacttgttctttttttaattcacatgatatttttatctttctgacgttttaaacgtatcagaagacgttatttattctgataaaaaacaacacactaaatataaaattatttcttgcagtaattataaaagccgaaaacagaactcaaaaacaatctggctaaataaaataacaaaatttgctttaaggaagaattttctatgtacacacagaccctgtatgagttaagtcaggaggctgaacgcctgttacagctttctcgccaacagttgcagttactggaaaaaatgcctctctctgtacccggagacgacgcgccacaactggctttaccctggagtcagcctaatatcgccgaacgtcacgcgatgctgaataatgagttgcgtaaaatttcccgactggaaatggtgcttgcaattgtcggtaccatgaaagcagggaaatcaaccaccattaatgccattgttggtacggaggttctgcctaatcgtaatcgcccaatgactgcgctgccgacgcttattcgccatacgcccgggcaaaaggaaccggtactgcatttttcacatgtcgcgccaatcgattgtttaattcaacaattacaacagcgcctgcgtgattgcgatattaagcatctgaccgatgtgctggaaatagataaagatatgcgtgcgcttatgcagcggatcgaaaatggcgtcgctttcgaaaaatattatctgggtgcccagcctatttttcattgtctgaaaagtttgaatgatttagtgcgactggcgaaggcgctggacgtcgattttcctttttctgcttacgccgccattgagcatattcccgtgattgaagtggagtttgtccatctagcggggctggagagttatcccggtcagttgacgttactggatacccccgggccaaatgaagccgggcaaccgcatctgcaaaaaatgcttaaccagcagctggcacgcgcctcggcggtactggcggtgctggattatacgcaactgaaatcgatctccgatgaagaggtccgtgaggcgattttggcggtggggcaatcggtgccgctgtacgtgctggtcaataagttcgatcaacaggatcgtaacagtgacgacgccgaccaggtgcgggcactgatttccgggacgctgatgaaaggctgtattacgccacagcagatatttccggtgtcgtcgatgtggggctacctggcgaatcgggcgcgctatgagttagccaacaacggtaagttaccaccgccagagcaacaacgctgggtggaagattttgcccatgccgcgcttggcaggcgctggcgtcatgccgatctggcggacctcgaacatattcgtcatgctgccgatcagttgtgggaagattcgctgttcgcccagccaattcaggcgttgcttcatgccgcttacgctaacgcctcgttgtatgctctgcgatctgccgcgcataaactgttgaattacgcgcagcaggcgcgggaatacctggattttcgtgcgcacgggttaaacgtcgcttgtgaacaattgcggcaaaatatccaccagatcgaagaaagtttgcagctattgcaactcaatcaggcgcaggtgagcggcgagattaaacatgaaatcgagctggccctgacctccgccaaccactttctgcgtcaacagcaagatgcgctgaaggtgcagttagccgccttgtttcaggatgattcggagccgttaagcgagattcgtacccgctgtgagacactgttacagacggcgcagaacaccatcagtcgcgactttacgctgcgttttgccgagcttgaatccaccctttgccgggtgttaaccgatgttattcgccccattgagcaacaagtcaaaatggaattgagcgagtcagggtttcgtcctgggtttcattttcctgtttttcacggcgtagttccccacttcaacactcgccagctgttcagtgaagtcatttcgcgccaggaagcaacggacgagcagagcacgcgtttaggcgttgtgcgtgagactttttcgcgctggttgaatcagcccgactggggacggggaaatgagaaatcaccgacagaaacggttgattacagtgtgttgcaacgagcattaagcgcagaagtcgatctctattgccaacaaatggctaaagttctggcagagcaggtcgatgaatctgttacggcaggcatgaatacttttttcgctgagttcgcttcatgtttgacggaattacagacgcgtttacgcgaaagtctggctctgcgtcaacaaaatgaatcggtggtcaggctgatgcagcagcaattgcagcagactgtgatgactcacggctggatttacaccgacgcccagctgttacgcgatgatattcaaacacttttcacggcagaacgatattgaccaagacgttacttgacggccccggtcgcgtgctggagtcggtttatccccgctttttagtggatctggcgcagggtgatgatgcccgccttccacaagcccatcagcagcagtttcgtgaacgactgatgcaggaacttctttcgcgtgtgcagcttcagacatggacgaacggcggcatgttaaatgcgccgcttagcctgcgtctgacattggtggaaaaactggcgtcgatgctggatcccggtcatctggcactgacgcagatcgcgcagcatctggcgctgctgcaaaaaatggatcaccgccagcactctgctttcccggagctcccccagcaaattgccgccttgtatgagtggttttcagcccgttgtcgctggaaggaaaaggcgttaacgcaacgaggcctactggtgcaggcaggtgatcagagcgagcaaatttttacccgctggcgtgctggggcgtataacgcctggtcgttgcctgggcgctgttttatcgttctggaggagttgcgctggggggcatttggcgatgcctgccgtctgggaagcccgcaagcggtggcgttgttgctgggtgatttgctcgagaaagcgacacaacatctggcagagagtatcaatgcggcaccgaccacgcgtcactattaccatcagtggtttgcctcttcgaccgttccgacgggcggggagcatgctgattttttaagttggctgggaaagtggaccacggcagataaacaacccgtttgctggtcagtgacccaacgctggcaaactgtcgcgctggggatgccacgactctgttcagcgcagcgtctggcgggggcaatgctcgaggaaatcttctctgtaaatttggcgtaaataatcagttacatcaatgagtcctaaacgaaatccatgtgtgaagttgatcacaaatttaaacactggtagggtaaaaaggtcattaactgcccaattcaggcgtcaactggtttgattgtacattccttaaccggagggtgtaagcaaacccgctacgcttgttacagagattgcatcctgcaattcccgctccccttttgcggccgtcgcgctgatttttctggcgtttgcggaaatgggccaactctgcgaggaaagctatgctgaaaaggaaaaaagtaaaaccgattacccttcgtgatgtcaccattattgatgacggtaaactgcgtaaagccattaccgcagcatcactgggtaatgcaatggaatggttcgattttggtgtttatggttttgttgcttacgcattaggtaaagtttttttcccgggggctgaccccagcgtgcagatggttgctgcacttgccactttctccgttccctttctgattcgaccgcttggcggactcttctttggtatgttgggcgataaatatggtcgccagaagatcctcgctatcactattgtgattatgtcgatcagtacgttctgtattggcttaataccgtcctacgacacgattggtatttgggcaccgattctgctgttgatctgtaagatggcacaaggtttctcggtcggcggtgaatataccggggcgtcgatatttgttgcggaatactcccctgaccgtaaacgtggctttatgggcagctggctggacttcggttctattgccgggtttgtgctgggtgcgggcgtggtggtgttaatttcgaccattgtcggcgaagcgaacttcctcgattggggctggcgtattccgttctttatcgctctgccgttagggattatcgggctttacctgcgccatgcgctggaagagactccggcgttccagcagcatgtcgataaactggaacagggcgaccgtgaaggtttgcaggatggcccgaaagtctcgtttaaagagattgccactaaatactggcgcagcctgttgacatgtattggtctggtaattgccaccaacgtgacttactacatgttgctgacctatatgccgagttatttgtcgcataacctgcattactccgaagaccacggggtgctgattattatcgccattatgatcggtatgctgtttgtccagccggtgatgggcttgctgagtgaccgttttggccgtcgtccgtttgtgctacttggtagtgttgccctgtttgtgttggcgatcccggcgtttattctgattaacagtaacgtcatcggcctgatttttgccgggttactgatgctggcggtgatccttaactgctttacgggcgttatggcttctaccttgccagcgatgttcccgacgcatatccgttacagcgcgctggcggcggcatttaatatttcggtgctggttgccggtctgacgccaacgctggcggcctggctggtcgaaagctcgcagaatctgatgatgcctgcctattacctgatggtagtggcggtggttggtttaatcaccggcgtaaccatgaaagagacggcaaatcgtccgttgaaaggtgcgacaccggcggcgtcagatatacaggaagcgaaggaaattctcgtcgagcattacgataatatcgagcagaaaatcgatgatattgaccacgagattgccgatttgcaggcgaaacgtacccgcctggtgcagcaacatccgcgaattgatgaataagctgaaacggatggcctgatgtgacgctgtcttatcaggccaattgaactcttaaggttcacttaatctctgacgcgcatactctcctccaggttaacggaggagagtgcaatgaaaaaccgtgtttatgaaagtttaactaccgtgttcagcgtgctggtggtcagcagctttctttatatctggtttgccacgtactgatctttcttcagccgtacccaggcccgcgtgccggaagtctcttgccggttttgcaggaaaaactgcccgtgatgcaactgtgtaatgcggctgacaatacttaaccccagaccaatcccgccataacggctgtccatacgtacaaacgctttactcaactccccgcatttactctcatcaatacctggtccttcatcttcaactgccatgaccgctccgtcatcttcttgcagcttaatcataatgttgctgccttgcgggctgtaacgatgggcgttttctaccaggtttcgcaataacatccgcagcagggttgcatcaccctgaacggtgatgtcggcggcgctctctggcaatagcagggtttgctgtcgctggtcgagcatggtactgagttcgtcatacgaggggagaatgacatcttccagcagttttacatgttgataattaccggaagaaaatgactgtccggcacgcgccagttgcagcagctgggagacgctctccatcatctgatcaagccgtgccactaacggtgctacatcaatgtgatgcgttttcgccagcagttccagatgcaaacgcacccccgccagtggcgttcgcagttcgtgcgcgacgtcagcggtaaacaacctttcgttatccagcgtgctggtcaggcgactgaccagatcgtttaacgccgaaaccaccgcttcgatttcgagggtggcgctgtgaatggcaatgggcgttaagttgtcggcggtgcgcgcttccagctctttttgcagctccgccagcgggcgggtgatgcggcgtaccgcctgatagcagataaatagcgtcaggctgaccataaagacgccggggacaatcaggctggcgaccgcctcgcggatctcacgcatgatgtggcgatcgttgttgcgattgtcgcgtagcgcctgctcaaacagctgaatctgctcggtactttcatgccatagccagaagacgctgatcagctcaaacaccaacaaaatggccccgatggtcaatatcagccgttggcgcagcgatattggtcggcgcagaaaatgcatcagattcaattagttttcctcattcgcgaccagcatatagccaaagccgcgcacggtgcggatacgggctttgcccactttgtcgcgcagattgtggatatgcacttccagggtgttggtcgagggttcattgtcccagttatagatgtcgttgtagagaatttcccgatgcaccggactgcctgctttgagcattaaccgtgacagcagagcatattctttgggcgtcagaatcaactcttcaccgcccatccatacctgacggcgacccatgttcagcgtcagattgccaacaatcagctcactttcgccctgattattatggcgtcgtagcagggcgcggatacgggcatgtaactcttccagcgcaaaaggcttcaccagatagtcgtcggcaccgacatccagcccggcgattttgtcggtcagcgtatcgcgagcggtgaggatcagtaccggcagggtatattttttctgccggatacgggcgagaaaatgcagtccatcttcgtcgggtaaccctaaatccagtaccaccaggctgtaatgacctgcctcaaggctttgttccgccatccgcgcggttgtcacgctatcgcacgcgtagccttcggtttgcgccgccagaatcagtccctgcaataacagcgtatcgtcttcaacaatcagaattttcattcactcactctcctgcaagtttgcagaatatcatccgcagcctggtaatacttcgtctcaacgccagttaatcccaatagcgtggagaataaattgtcttgtgaatagtgttgcgtttgcgcctgtttttgcaggcagttctggtcaacctgataccgtttttgataatcctccgacagccacagcagcatcggcacctgtttttggctatccggggcgatggcataaggcagaccgtgcagatagatgccattttcacctaacgattcaccgtggtcagaaagataaaccaggctggtggtaaatttatcctgatgttctttcagcagattaatcgctttatcaacaatatagtcgacgtaaaccagcgtgttgtcgtaagtgttcaccagttgctctttggtacaggtctggatctcattggtgtcgcaggttggggtaaatttcctgaactgaggcggatagcggttgtaataggtcggaccgtggctgccgatggtgtgtaagacaatcacgccatcaccttgcaggttattgatgtactcttcaagcccgtggaacagcacttcgtcatagcattcgccgttgatgcactgatcaggtagattcagcgcggtgacgttctggtgaggcacgcggtcgcaggcacctttacagccgccatcgttgtcattccacagcacgttgatgcccgctcgctgaatgatatccagcacgccttcctggtgctgtgccagctcttctttgtagtgctcacgcggcatatccgagaacatgcacggtactgaaactgccgttgccgtgccgcaagatgcggtattagggaaatagaccacgttatctttcgccagccgcgggttagtttcacgcgggtagccgttgagggagaagttctccgcccgcgaggtttcgccgacaatcaggatggtcaaatttttacgtttttcgttctgcattaacgggttgcggtgcgcgtcttcaccaattcgcaccagcggcagatttgccagtcgctgatgggagtaccatgaccagctggcaacaatgctgttagaggggcttaaggatttcaccagctctttgttattgcggaacaacgaggcgtagtctttataaaacagtgcggcgaccagcaaaatcagtagtacagaaaccagaatattggctccacggaaaagaacactgcgcagacgcgaggtggcaggtttgatttttatccagcaggcaatcagcgcagcaagcacgccgctgaatcccagcgttaataacatttgcggtgtcatcagcgcataactttctgccggagtggtatcaataatattggcaatcatcgagcggtcgatgacgatgccgtaagtcattatgaaatattgtgcagccgcgccaaccagaataaacaggcaggccagtggtcgattaagccataagaaagagcttagtgtcaggacaatattaatcacgctgaaagcgacgaccggcatcgacaagaaaaccagtacgttatgcagcgaatccagcggcagcgcctgcaacacctgtttaaaaaaggcaatattcaggcagatagagatataaaaagcggccaacaatagccaggcgagtaaattcaaagagggtctttttagtaggcgcttcaacatcacggtgtttccatcgaacaaagtgcgcatatgctcgcaaagcaaaattaagccaaccttaagttcttaaggttggcttttatgtttgctggattaaggggaattaatctttgcttattggtgcatctaagggatacgggtttttatgtagccggttgtaattcagcgcatacatggcggtgatgaccatcagggtgacaaatgaccacataacctctttcgctccggaccccaccacggcccagatgcagtagaggaaggcaatggtagtaactgccagatatgccgggcgtgctttaccaaagtgaccgtgtccgagcagcagtaacgccgcacaggtgtaaagatatggcaccagtgtaaagatgaccgagacggaagaaaccagaccgaactctttggtcgcgtttggtgaaatgctgctgagctggaagatggtcatcaaaataccgacgataatcagccccgccactggcgtacccgctttatttacacgggcaaaaatcggtgggaacagtccgtcatcggcagcggctttcgccgtttgacccgccagcaacgtccagccgcccagtgaacctaagcaacccgcagctgcgcagaaggaaacaatggccccggcggtgtcacccaacgccatccgtgcggcatcaccgaatggcgaagcagaaacgcgcagtgcggcattagggatcatccccataatcgcggtggtagaaagtacatagcaaacggcggcaatcaataccccaccaatggtggcgatagggacattgcgtttcgggtttttcaccacacctgcggcaacggaggcactttccacaccgatgaacgaccacagcgtaacgttaagggtactttgaattgcaccgaaggtgcccaggccgctgacgttccatgccgccatataggtttcaccacggaaccagaaccagccaaatacggcaatcccgacgatggggatcagcgccagcacggtggcaactgcctgcacacgggtgatcattttcggaccgacaatgttcagcaggacgaagatccacagcaccacgacgcaggtgatggttaataccaatggatctttcagaatcgggaagaagtaacttaaatatcctacgccaatgaccaccatggcgatattgccgatccagcaggccagccagtagaggacgttggtttgataaccgagaaacgggccaaagcagcggcgggcgtaagcgtaagaaccaccaggacttgggtcgaggaacgacattttggcgtataccatcgagagccccagtgcaccgataatcgtcaccaaccatccataaatggcaatcccgccagtagaggccaggtttgcaggtaacagaaaaacacctgaccccataatattccccgacaccatcagggtgacggggattaagcccactttgtgagcatcagcatccgaagacataattaaactcctgcgaaggcgagcttcgtgacaataaattacgtcatatcatacgcctgcattcgatagttgaattattatcgaccgggttatcgctgatgccgttattaatatagctcttcgttaaggttaaaaatcaggcgacagtgcgttctctgtgctgactaacataatgcagcggcgtcataccgtagaagtctttaaagacagaaataaagtacgacgtactgttgtagccgcaggactgtgatacctgagagatatttttaccgtccatcattaattcatttacggcataacgcatgcggcaggtggtgattatttggctataactggtgttttcgcttttcaactttttctttaacagacttgggctaagacataaacaactggctaccatactaagattccagtctttgtgaatatcgctttcaataatttgataaacgctgtcacttacacaattacgtaacatatacatcattaatgaaacgaattttttactgtcgagaaaacgggatagcaccgtgaataataatgcgcgtgttcgttccttttctgactcagtttctgcgggcatcatgctgtgttgcgcggcaacgcgaaagacgtctggcgtcaggcatggcagggtgagtatgggcgtagcgctacgttgccatactggtatttgcgagagatctttattcagaaaccggaggtaatctttgatgatgtcgtgactaatatgagcaaccaaagtgttgttaagagaggagacgtcgataatattattttcacaatttaataacgccatatggttagctttaaggctaataggttctttcccattcacccttatccagacatctttttcagtcaataaaacaatacaaggttggtcgctgcaaatcctcatacatgtactcctgagtgcgaataaaagaccagttctcgctaaagcaaagcgataccgggaaatggttatataattgtatgatgaatataaacatgcataaaaataacgagttttactaatagtacaaatttttatagtaatttctcatgtacatatttttttacaggataaataacaggcaaaaaaaagcgcggggtggggccgcgcaaaaagtatgacatttttgtttgcagcaatttttatgaaaacgttgccatactcaaaaggcctaaggccaggcggcgtaatgttatttaaacaattacgccttcagcggaatagtggttacgctttcacgcacataacgtggtaaataccgtcaataatttcagtcccttcagtttcgtgttcaaatccagggaaatggtggtcccaggattgcagcgagcgtaaataacttacttgcggactgtttttatcgccgaagttttcaccagacagcagcatcgggattcctggcggatacgggataactgagtttgccgcgatgcgtcctggcagattttcaatggataccagttcgacattgttgtcgacaatcgcgttgtacgcttcacgcggggtgacttccgccaccggcaggccggaataggcttcgttcaaccgtgcgccagggttgttttctttcagccaggcaaacatggtgtcacccagatcgtgaatccccatgttcgcgtaagtgtcaggatattgttcaacaagttccggcatcacctgcgccagcggtgtgttggcgtcatagtggcgtttgaaggagcaaagggtgttaaccagagttccccatttcccacgggttacgcccatagagaacaggaacataatttggaagtcagtggtgcgggtaggtacaatgccgtggcgaccaagccaggcagtgaccagcgccgccggaacaccggtttcttccagttcaccatcttcacccattcccggagcaaggatgctgactttaatcgggtcgagcatactccagttatccggaatatctttgaagccgtgccagctttcgcccggatgcattacccagcagtcctgaacggtggtcagcagtttggttggtgcgtcagcaaagtcataggttttgccggtttgtgggtcggtgacgacttctttgttccacggtttgaagaaccagctaccgtcagcggtgaactctttatatagccgcgccatcgcctgacggaaatcaaccgcttcgtcaatcacttcctgtgtcagtgacaggccgctgttgccgtccatcatcgacaccgccacgtcgttggatgcgcagatggcatacagcggggaggtggtggcatgcatcatgtaggcctggttgaagcgggagaagttaatcgccccacgaccttcacgtacatgaatataagaagcctgtgacagcgcattcagcagtttgtgggtggagtgggtggcgaaaacggtaggaccgttgtgatcgccaggttcgccgcgcatggcatagtgatcggcatagatcgggttgaaacgtgcatagccgtaccaggcttcgtcaaagtgcagacgatcggaggttttttccagcagatcctgcgcttctttagcgttataacacacgccgtcataggtgcagttggtcaccacgcagtaagacggtttttgcccggctttgtctttggtcagcgggctttcactgattttcttctgcaaggtttcaggttgcatttcctgcggatagattggcccgataatgccgtagcggttgcggcttggcaccatatagaccggtttcgcgcctgtcagcatcaaaccttgttcgatggatttatggcagttacggtcaacgaccacgacatcgttatcggtcatgcaagcctgcatgatggtgcggttagagccggaagtaccgacgactaccgaccaggagcgatcggcaccaaatacgcgtgcggcatatttttcgctttcgccaaatgcgccagtatggtcaagcaaagaaccgagggaagttcgttcgatgcccatgtcggtgcggaacagattttcaccatagtagtcatggtagaaacgtccggcgggtgttttggtaaaaccaacgccgccctggtggcctggcgctgcccaggaatattcatggatgtcactatatttcatcagcgcgctgaacagtggcggcaacagctgctggcggtagcgggtcatcgcggcaacggcgcgtccggcgataaagtcggcggtatcttccagaatccaggcgaattcatcgacaagctccagcaggtcgcgatccattgcggcgagggctttttcccgatcgcccaacaggaagaccggcacgttttgttggcgctcatgaagcttaccgatcaattgtctgacgttttgatgttcgtccggatgttccatttgatagctgaacatcaggcagtcaatggcttcgtttgaagagagaatggcaaaaccatcatcaaaggaggtggatttaatcacggtaacattttgctggcttaaagcatctgccagacgctcaacggcgttaccgacccaggtgtcttgatggagaaactcgctttcaacaattaatactttcatcattgcttacccggttatgaaggaatcttcgttgcgggcaagtatcttccggccttttcgggctgtaaagcgcgtgaaaaacaaacatttttgaaatatttagttttataaacaatacgttatgtgattattttaaattattttcactgcttattatcgacggctaaactatttttttggctgatactgatatcgtctttagccgggaaacgtctggcggcgctgttggctaagtttgcggtattgttgcggcgacatgccgacatatttgccgaacgtgctgtaaaaacgactacttgaacgaaagcctgccgtcagggcaatatcgagaatacttttatcggtatcgctcagtaacgcgcgaacgtggttgatgcgcatcgcggtaatgtactgtttcatcgtcaattgcatgacccgctggaatatccccattgcatagttggcgttaagtttgacgtgctcagccacatcgttgatggtcagcgcctgatcatagttttcggcaataaagcccagcatctggctaacataaaattgcgcatggcgcgagacgctgtttttgtgtgtgcgcgaggttttattgaccagaatcggttcccagccagagaggctaaatcgcttgagcatcaggccaatttcatcaatggcgagctggcgaatttgctcgttcggactgtttaattcctgctgccagcggcgcacttcaaacgggctaagttgctgtgtggccagtgatttgatcaccatgccgtgagtgacgtggttaatcaggtctttatccagcggccaggagagaaacagatgcatcggcagattaaaaatcgccatgctctgacaggttccggtatctgttagttggtgcggtgtacaggcccagaacagcgtgatatgaccctgattgatattcactttttcattgttgatcaggtattccacatcgccatcgaaaggcacattcacttcgacctgaccatgccagtggctggtgggcatgatatgcggtgcgcgaaactcaatctccatccgctggtattccgaatacagcgacagcgggctgcgggtctgtttttcgtcgctgctgcacataaacgtatctgtattcatggatggctctctttcctggaatatcagaattatggcaggagtgagggaggatgactgcgagtgggagcacggttttcaccctcttcccagaggggcgaggggactctccgagtatcatgaggccgaaaactctgcttttcaggtaatttattcccataaactcagatttactgctgcttcacgcaggatctgagtttatgggaatgctcaacctggaagccggaggttttctgcagattcgcctgccatgatgaagttattcaagcaagccaggagatctgcatgatgtctgcacccaaaattacatttatcggcgctggttcgacgattttcgttaaaaatattcttggtgatgtgttccatcgcgaggcgctgaaaacggcgcatattgccctgatggacattgaccccacccgcctggaagagtcgcatattgtggtgcgtaagctgatggattcagcaggggccagcggcaaaatcacctgccacacccaacagaaagaagccttagaggatgccgattttgtcgtggtggcatttcagattggcggttatgaaccttgcacggtgactgatttcgaggtctgtaagcggcatggtctggaacaaaccattgccgatacgttggggccgggcggtattatgcgcgcgctacgtaccattccgcatctgtggcaaatttgcgaggacatgacggaagtctgccccgatgccaccatgctcaactatgttaacccaatggcgatgaatacctgggcgatgtatgcccgctatccgcatatcaaacaggtcgggctgtgccattcggtgcagggaacggcggaagagttggcgcgtgacctcaatatcgacccagctacgctgcgttaccgttgcgcaggtatcaaccatatggcgttttacctggagctggagcgcaaaaccgccgacggcagttatgtgaatctctacccggaactgctggcggcttatgaagcagggcaggcaccgaagccgaatattcatggcaatactcgctgccagaatattgtgcgctacgaaatgttcaaaaagctgggctatttcgtcacggaatcgtcagaacattttgctgagtacacaccgtggtttattaagccaggtcgtgaggatttgattgagcgttataaagtaccgctggatgagtacccgaaacgctgcgtcgagcagctggcgaactggcataaagagctggaggagtataaaaaagcctcccggattgatattaaaccgtcacgggaatatgccagcacaatcatgaacgctatctggactggcgagccgagtgtgatttacggcaacgtccgtaacgatggtttgattgataacctgccacaaggatgttgcgtggaagtagcctgtctggttgatgctaatggcattcagccgaccaaagtcggtacgctaccttcgcatctggccgccctgatgcaaaccaacatcaacgtacagacgctgctgaccgaagctattcttacggaaaatcgcgaccgtgtttaccacgccgcgatgatggacccgcatactgccgccgtgctgggcattgacgaaatatatgctcttgttgacgacctgattgccgcccacggcgactggctgccaggctggttgcaccgttaaaacgcgactaaacgctactgcgccgggggatttattccggcgcacacctctgacgataccaataacagaaggcgggcgttggtaacagcgacccgataccctatgagcatttcaatgactacaaaactcagttatggatttggagcgttcgggaaggattttgcgatcggcattgtgtatatgtacctcatgtattactacaccgatgtcgtcgggctgtctgtgggtttggtcggtactttgtttctggtggcgaggatctgggatgctattaacgatccgattatgggatggattgtaaatgctacgcgatcgcgatggggtaagttcaaaccctggatcctgatcggtacgttggcaaactctgtaatcttatttctcctctttagtgcgcatctgtttgaaggtactactcagattgtctttgtttgcgtgacctacatcctctggggcatgacttacaccattatggatattcccttctggtcgctggttccaaccatcacgctcgataaacgtgagcgcgaacaactggttccttatccgcgtttttttgccagtctggcaggctttgttacggcaggtgtgacgctaccatttgttaattatgtcggcggtggcgatcggggatttggctttcagatgttcactctggtactgatcgccttttttattgtttcaaccatcatcactctgcgcaatgtgcatgaagtcttttcgtcagacaatcaaccgtctgctgaaggaagccatctgacacttaaagccatcgttgcgctaatttataaaaacgatcagctttcatgcctcttgggtatggctcttgcttataatgtagccagcaacattattaccggctttgctatctattatttctcatatgttatcggtgatgcggatttgttcccctattatctgtcgtatgcgggagctgctaacctggtgacgttagtattcttcccacgcttagttaaatcattatcccgacgcattttatgggccggagcatctattcttccggtgttaagctgtggtgttctcctgttaatggcattaatgagctatcacaacgtcgtcctcattgtgattgcgggtattttgctgaatgtgggaacggcgcttttctgggtattacaggtcatcatggtggcagatatcgttgattacggtgaatataaactgcacgtacgctgtgaaagtatcgcttactccgtgcagactatggtggtgaagggcggttcagcctttgcggcttttttcattgcggttgtgttagggatgattggctatgtaccgaatgttgaacagtctacgcaagccctattaggtatgcagtttattatgattgctctaccaactctgtttttcatggtaacgctgattctctacttccgtttctatcgcctcaatggtgacacgctgcgcaggatccagatccatctgctggataaatatcgcaaagtaccgcccgagcctgttcatgctgatattccggtcggtgcagtgagtgatgtgaaagcctgacgtggacaatagctaacgaaaatggcctgatgcgatatgtttatcaggccacgtcttaatgtaatgctttggatttgcaaattttgtagaccggataaggaattcacgccgcatccggcatcaacaaagcgcaagttgttatccggttatcaagccaaagcgccgtagctggcggcaatgaaagcgagcgaggaatatcaccgtcgttaatgcgccaagcagcgcgcagaacatatcggattgcgtgtcccactggtcgccctgggtgccgagaaaatcatccgctccctgacccattgccagcgctgcccaccactcgattaattcatacatcgcgcttatcgccagcgccacgcagcagaccaggaacgccaccattttacgtccgcgcacgtacatcccgcgaacgagaatttctcgtgccaccagtgcaggcaccagcccctggaaaaagtgccccagcttgtcatacggattacgactcaaccccagccattcctgcacctcaaaaccaacggggactttcgcgtaggtgtattgtccgccgaccatcaggatgatggcgtgaaggaaaatgagcgtatagagcagcggcgttaacggataacgtctggcggtggcaagcagtagctgcacgacaataatcaccggtgtcacttccatcagccaggtgagtttgtcatgggccgaaatgccggtataaatcaggattaacgttagcgtcagtgcgctggtgttaagaattaacggcttgagtgtgcgggtcatggtgagttcgcaaatcagggaaaatactgactattcaccagcaagcgtgaaattacaatcgcaaaagaggtggccagggggatcacctggcagcatgctgccaggcgctgggccgaagaggttacttagtgcagttcgcgcactgtttgttgacgatttgctggaagaagtcgttacctttgtcatcgaccaggataaacgccgggaaatcttctacttcgattttccagatagcttccatacccagctccggataagcgacgcactccagatgcttgatgctctgctgcgccagtaccgccgccggaccgccgatgctaccgaggtagaagccgccgtgtttatgacacgcgtcggtaacctgctgactgcggttacctttcgccagcatgatcatgctgccgccgtgggattgcagcagatccacgtaggagtccatacggcctgcggtggttgggccaagtgaacctgatggataaccggcaggggttttcgccggacccgcgtagtagatcgggtgatctttgatgtactgcggaagttctttaccggcgtcaatcagctctttcagcttggcgtgtgcaatatctcggcccacgataatggtgccggtgagcgacaaacgagtggataccgggtattgcgaaagctgggcgaggatctctttcatcgggcggttaaggtcaactttcaccgcttcgccttcaccggcctggcgcagttcttgtggaatgtactggcctgggttgtgttccagtttttcgatccagataccttcgcggttgattttcgctttaatgttacggtcagcggagcaggagacgcccatgccgaccgggcaggatgcgccgtgacgtggcagacggataacgcgaatgtcgtgcgcgaagtatttaccgccaaactgcgcgccaagaccgagtttctgggcctcttccagcagttcctgttccagctggacatcgcggaacgcctgaccatgttcgttcccttccgtcggcagttcatcgtaatagtgagcgcttgctaacttgacggttttcaggttggtttccgcagacgtaccgccaatcacaaacgcgatatggtacggcgggcaggctgcagtaccgagggtacgcattttctcgacgaggaagtttttcagtttgccgggagtcagcagggctttggtttcctggtagagatacgttttgttggcagagccgccgcctttcgcaacgcaaaggaatttgtactcatcgccatctaccgcgtacaggtcgatttgcgcaggcaggttagtgccggtgttgacctctttgtacatgtccagcgccgcattctgtgaatagcgcaggttatcttcgatataggtgttatagacgcctttcgacagcgtttcttcatcaccgccgccggtccacacgcgctggccttttttaccgacgatgatcgcggtgccggtatcctggcaggtcggcagcacgcctttggcggcgatttcggagtttcttaagaattgcagcgccacgtacttgtcgttttcgctggcttctggatcgtgaagaatagccgcaacctgtttctggtgtgccgggcggagcataaaagaagcgtcgtgaaaggcttgctgcgccagcagggtcagggcttctggttccactttcaggatggtttcgccgtcgaagtcggcaacgctaacgtaatcggaagtgagtagatagtattcggtattgtctttccccatcgggaaaggtgcctggtagataaagggtttgtttgacatagcttccagcctgtaactctgtatttgttattcgaaaatggcgtgccgcgtagtcacgggcggcacgcaaagtgcatttataagaacccgtacatcgcggcgaagatccagccgaagacgcacgatacgctcacaccaatcaaccccggcagaataaagctgtggttgatgacgaagcgaccgatgtgggtggtgccggaacggtcaaactgaatcgctgccagatcgctcggataagtcggcaggatgtaataaccgtagcaagccggtgctgaagccacgatgtatgccggatcaacgccgatcgccagcgcgaccggaacaatcgccgccagcgccgcagcctgagagtttacaaacttggaaaccagcagcagaacaatggcataggcccacggatactctttcaccatttcacccagtacgccctgaatttcagacatatgcgcaccgaacatggtttctgccatccatgcgataccgtacaccgccacgatggcgatcataccggaacggaagacttcgttttttgagatagacgcgggattggttttggtcaggataataatcagcgccccggtcagcagcataaacatctgaataaccagtaccatcgacagcggtttgccgccgaaggatggacgcaggtccgaatcagcaccaagaagggcgactacagcgattgccccgaggaaaatccacattgccagccagttgcttttcggcagttttttatccagcagcgtcgcggtatcaccgtaaacatactcacggttttccggtacggagatgaatttctggaactcttcgtctttatccagatctttaccgcggaaccagctgaagataccgatcgccaggataccgattaacgtcgatggaatggtgattgccagcagatcgaggaactcaagatggcgaccatcaaaggtgacattacccagcatcgcaaccagagacacgaccgcaaccgacaccggactggcgataatccccatctgtgcaccgatagaacttgccgccatcggacgttccggacggatgttgttcttaatggcgacgtcgtagatgatcggcagaatggtgtaaaccacatgacccgtaccgcaaagaatggtcagtgtacaggtcacaaacggcgcgacaattgagacatatttcgggttgcggcgcagcagcttctcggcaatttgcagcatgacatcaagaccgcccgaagcttgcaaggtcgccgatgccgccaccaccgcaatgataaccagcatgacatcaactggtggtttacctggctgaaggtggaagacgaagaccagaatgaccagaccgataccgcctaataaacccagcgcgataccaccctttctggcaccataaaacagacatatcagtattatgataagttggatagtaaataacatgtgtgaaccctcgcgataatcctatttaaatttttgctgaatagatcacagtcacgttctgttttgtatgaactgttttcagagcctgactaaatatccgtttggtcgttaccggctttagcaaatacctcacagtgaatattggctgattaaagcagcggcaaatttatgcactgtgataagcggctttttcagagagaaagactctctggcgatgggtttatagtttgtactgcgcagatgttaatgttttgtttgctgttatcttattgatatttatcggtctattttttgttctcagggcagatgtcattaggtttatagattaatctgatctacccatttgtgggtaaaaatacacataatgcgggtgacataatagttaattaacttttgttagcgttttgaaattaaaaacaccgttcacctgaagagatattaatttttagcgatgatggagggataattatatttgatctggcacaagttttactgatgaaggatgtaacttgtgccaggggtattttgcattacggtaataattattacttacagataaccagcgatccgttattggcaatattgtttcagtagtgagtagtgttctgcctgaatacggtaacggtaaactggacgccccgtgacgccataatggatactggtgaacaagatgtggcagttgaccagccagatgaggtatttacggcaggaaacacgcgaaatgttaacctcgttggctagctcgtcggttgaaaattcatagtcctgatgcgcgtcaatccactggcacagtgtgcgtaacgtctgcggcgttaagccttttggcaagcgacgaggatcctgttcgttggagctgctgccgtggattagctgatcaagctcggcctggtcataatactgatgtttttccagcgccattttcttttgccgccagccggtgagcgcctcttcaaagcgggaagcctggaagggtttgatcaggtaatccacgacaccgtaatgcagcgaatctttaatggttgccgcatcggctgcggaggagatgacaatcacatcacttttgcaacgcgcgttatgcaggacaggcagtaaatcgagcccgttctctttttgcatatagatatcgagcaatatcaggtcgataggcgtatcgctattgaagataatctctttggctttctccagcgtcgaggctgttccacagcattgaaagcctgggatttgtgctacgtatcggcgattcagctccgcgaccattgcgtcgtcatcgataattaatacattgatcatctgttcgacctctccccgtcccagggtatctggacaaaaaattgtgtgaaaatcccgggttccgattccacggcgatgctgccgccgagattttctacctgttgtttgacaagtgctaaaccgacgcctcgctcgcttccttttgtcgagacacctttgtcaaaaatgtgatcgattttatcgggtgcgatccccggtccatcatcattaacttcacagtgcagccagccgtgacggtagtgcaatgttacgctaatttcgcctccgggttccggccctaatgcctccagcgcgttttctatcagatttcccaacgtggtaatcagcgtcgcgacctggtcctcactgccgctgtctggcagctggctttcactgtttaaaatcagcgtatggcctaaatcggtcgcgcggttaatcttgctgattaaaaaaccagcgataaccggagatttgatcttacccagcagagagccaatctcttcctgatagttattggctgttttgagaatgtaatcttccaactgcttataactcttcagatgcaataatccgagaatcacatgcaatttattcataaattcgtgggatcgttcacgaagtgcgtcagcatagttgaccagaccgtcgagtcgctgcatcagtttacgtacttcagttttgtccctgaaggttgaaatggcaccgatgataacgccattactgcgcaccggaacggtgttgatcagtaatagccggtctttaatcgtaatctcttcgtcgcggcgcggggtaccgtcgcgtaacacttccgagacatctaccacctgtgaccatgagtggcttagcgtcgacagtttctcatcgtcctgcgacttacggtaattcagcaattcttgtgcggcatcgttgatcagcgtgacctcgccgcgatcgtccacggcaacgacgccttctttgatagactgcaacatggcctggcgttgctcaaacagcgtggagatttcgtagggttccaggccgaaaaggatttttttcagtaccttaaccagaatgcaggtgccaatcagtccgaccagcatgccaaataataccgaccagataatgctccagcgactgtcattgatctgttgggtcacacggcttaactcaaggccgatcgccaccacgccaatttgtttatgattttcatcgtagatgggggtaaatacgcgtaaagcctgcgccagaaaaccgcgattgatagcgacattttcttcgccattcagcgctttaaggatgtcatcacctttaaatggctgaccaatacgctgggcttcaggatgcgagtagcgaagactttgcatatcggtaacgacaataaacagcagatcgttgcgtttgcgtacggcttccgcgatggcctggatgccactctcctgcggttttttctgcaagccctgacggatttccggcgagtcggcgagggtacgcgccactgccagtgccttgttggctagcccatctcgcgtcatatcactgatttgcgagaagtaaatcagatgcaccaccaatagcaccgagaacagtaccgcactgaccattaagatcactgtggtactcaatttcatcggacgtttgcgtaacatgcggtagggcaatgaatgtctcatcagcttccttgtgtgacaaatttcttaagcattatctctgatgaggcgggtaattcaaagggagtaagaatgattggctatataggggaagagactctggcaacggaaactgccagtgctgtatgaagattccggggctatgcttatagcgataatcatactgatgagagagggaaggtcatggatcaggcgctactggacgggggttatcgctgttataccggcgaaaagatcgatgtctatttcaacactgcgatatgtcagcattctggcaattgcgtacgtggcaacggcaagttatttaatctcaaacgaaagccgtggatcatgccggatgaagtcgacgtcgccactgtggttaaagtgattgatacgtgcccgagcggcgcgctgaaataccgtcataaataagcgagggtaaaatggaaatacgcgaaggccacaataaattttacattaatgacaaacaaggcaagcaaatcgctgaaattgtctttgtgccgaccggagagaatttagcgattatcgaacataccgatgtcgatgaaagcctgaaagggcaagggattggtaaacagctggttgcgaaagtcgtggaaaaaatgcgtcgggaaaaacgaaaaattatcccattatgcccatttgcgaaacatgaatttgataaaacgcgggagtatgatgatattcgcagttgatgggagagtacagagtcacgatatttttcattctctccgcgatgtgatgcaggagagcatctgaagggtagggggatgcacaaagaatgggcagagagcgcgtttttttgtcccaagtcatcccctttactgagcaaaaaaaagaatatctcctatatgagaatcatcaatcggggttaataagttttgcgtccccagagcgtttaatattgataggagtcatattatggaaggtaaaaacaagttcaatacttatgttgtttcttttgattatccatcatcttattcctcagtgttcttaagattaagatcattgatgtatgatatgaatttctcctctatcgtggctgatgaatatgggataccacgacaattgaatgaaaactccttcgcaataacgacatcgttagccgcaagtgaaatcgaagatttaatcaggctcaaatgcttagacttaccggatattgattttgacctcaacattatgacagttgatgactatttccgtcagttttacaagtagccaggaaggataagaagaacataaaaaatggcactattctctaaaatattaattttttatgtgattggtgtgaacatatcctttgtcattatctggtttatctcacatgagaaaacacatattcgtttacttagtgcattcctggtcggaataacctggccaatgagtctgcctgtggcattacttttttctctcttttaggagctgtagttgagtggacccgctggttatcgtgaaacgaagcgtctctcctcaaaactggatttgcggaacgatgaacgaagcagtcgcctgactgcttcgttcattaaagtgaaatttatttctgtgggcgcatcgccgggaagagaataacgtcgcgaatagtatggctgttagtaaacagcataatcattcggtcgataccaatacccagaccagcggttggcggcagaccatattccagcgcagtcacgtaatcttcgtcatagaacatggcttcgtcgtcacctgcagctttagcattaacctgttcctggaaacgttcagcctgatcttctgcgtcgtttaattcgctaaaaccattaccgatttcacgaccaccgatgaagaattcaaaacggtcggtgatttccgggttaacatcattacggcgtgccagcggggacacttctgccggatattccgtaataaaggttggctgaatcagatgtgcttctgccacttcatcaaagatctctgtgacaatacgtcccaacccccagcttttctctaccgtaataccgatagattcagctaatgctttagcagcatcaaaattatccaggtcggccatatcggtttctggacgatattttttgattgcttcgcgcatggtgagtttttcaaacggtttgccgaaatcaaacacatgctcgccataagtgactttagtggtacccagaacctcttgtgccagggtgcggaacagtgactctgtcagttcaatcaaatcgtggtaatccgcatacgccatgtagagttccatcattgtgaactcaggattatggcgaacagaaataccttcattacggaagttacggttgatttcgaatacccgttcaaaaccgcctacaaccagacgtttcagatacagctccggcgcgatacgcagatacatatctaaatccagagcattatgatgggtaataaacgggcgagcagatgccccacctggaattacctgcatcatcggggtttctacttccataaagccgcgcgcgaccatgaattgacggatagcggccagaatttttgaacggacaacaaacgtttgacgggatttatcgttagcgatgaggtccagataacgttgacgataacggacttcctgatcctgcagaccatggaatttatctggtaaaggacgtagtgctttagtcagcaggcgcagctcagtacagtgaatggaaagctcacccgtttgcgtcttaaacagcgtaccgcgggcaccgataatgtcacccagatcccattttttaaactgatcgttataaacaccttctggcaggctatctcttgcaacgtacagttgaatacggccaccgacatcctgcaacgttacaaaggaggctttccccatgatacgacgggtcatcattcggccagcaaccgagacttcaatgtttaaggattccagttcctggttatccttcgcatcaaactcttcgtgcaactggtcagaggtatggtcgcggcgaaaatcattgggaaacgccacaccttgctgacgtagtgccgccagtttttcgcggcgatttctcagttcatcgttaaaatcaatagcctcattggctccccgtgtttcttgttcagacattttggttcctctaaatccagctttcaatttagcgtagataaagagacagatcggtacactgtattatctgcctcgactattagtaactcagtttatcttatcgaaactaacgcttacctcaagttgatatcactaataaataaccatcaaaatggtttaaatgacttattaatctcgatttgttagtgttataaactgaaagttaatttattcataaccaattgtttttacgacagttaatcgttgctctcctgtatcatattcgtcggcgtgctaaacagaaaacgggtagcaaaggccaatacgacgatgatcgcgacacaagccaacgtccactctcccatctgagaaaagaatcgctggtaagctgcaattgccataccgctaatttgcgactctgtcgtctgctgtgccacgacgcctgccagccagttggcgaccgcgcctgttgccagcatataaatcccggttaatacgccagacattttcagacgcgtgatttgcgcaatcgccaccgggtcaataaagagttcggcaaagcccattagcgccagcccggatatcatcacgcccattgacgcttgaccgtcagccgctgcatgtcgggcatcaaatgccaacaacataaagccacaagccatcagcagtaagccaaaggcaaacttcagccagacgcgcaatgttgagttgccgcggctttctggcgacgccagccaggccagtacaaccccagcgagcatcaccgcaattgcattcaccgactggaatagtgctgtaggtacttcaatattgaatgcctgacgattcacaaagcgatcgataaacaagctgatggtactgccgccctgttgtgccagtacccagaacaatgtcccgacaaacatcaacaatacaatttgccaaagagcacggcgatgttcggggaatttgatcatcatgcgggcaatgatttgtgcggcaatgaggcaaacgatcgccagcaaatatccggaccagtcgttctccagcagcagagtaaaaaatactggggctaaacagagcatcaccactaaccagctccatactggtaaggcaaatttgacactagtgagcgcttttttatccatactacgtgtggactggaaatgacgatgaccgcttaagaaaatcaacaaaccgataaacatgccgccacccgcaagggcaaagccaacatgccatccataccactgagcagccaggccgcaggcgattggggctgcgatagaaccgatattgcccgcagcatacagcagcgaaaaaccgccatcacgtcgatgatcgttctcgtcgtagagctcgccaagcaaacagctgatgtttgatttgaataaaccgtagccacaaataatgattgccagcgccagatacaggctaaaggttgaatttgtatcaatacccagcaccacatggccaagggtcattaacagcgcgccggcaatcactgcagtgcggttgccgagcaggcggtcggcaagccagccgccgagaataggggtaacgtaaaccagagaagcatatgcgctgaacaggctgatggcatggttatcatcaaaaccaagctgatgggtgagatagagaatgagtaaggcacgcatgccgtaaaaactgaagtactcccagatttggatcgccacgatatagtatatcgcgcgcggctgtgagggtgttttcatgtgttctccttatgagcaaaaaagggaagtggcaagccacttcccttgtacgagctaattattttttgctttcttctttcaataccttaacggtatagcggccatcagcctgacggtatgcaccgtgaatatcggtttcaaagcccggatagtgagcgccgatttcacacagcatctgcaggaactccagaaccggacggctttcttcggtgatcatttcacccggcattaccagaggaactcccggcgggtacggaaggatcatattggcgttaatacgacctaccatttcgtcgaggtaaacttcttcggtcataccgtgcagctctttctggaatgcagcatacggagtcattaccatcgtcggcagcacttcaaatgcgcgatacatcagatccggcagattgtggtgaacaatcagtttgtggatattctgagccagttcctgaatacgcatgttttcatagaattcaggatcttcacgatacagagacggcagcatgtttttcacacgcaggttcaggtcgaacgcacgtttaaagtcagtcagagcacgcagcaggctcagtgctttggtcttatcgataccgatgctgaacaggaacagcaggttatacggaccggttttctcaacaacgatgccatgttcgtcgaggtatttcgccacgatgctggccggaataccaaagtcgctcatggtgccgtctttttccatccccggagtcagcagggtgactttgatcgggtcaagatacatgtgctcgttatcgatgtttttgaagccgtgccaggtgctgtcagaacgcagcggccagcattcagtcgtatcgatatgatccggctgccatacatcaaagaaccagccatcagattccgttctcagacgtttgatctctttacggaatttgatcgcacgttcaatagaaccgttgatcagacgcttacctgcattgcctttcatcatcgccgcagcggtttcagtggacgccacgataccgtagtgcggagaagtggtggtgtgcatcatgtaggcttcgttaaaggtttcttcgtttacgtcacctttaacgtggatcatggaagcctgagagaacgccgccagcagtttgtgagtggactgggtttcgtaaatcactttcccttctacacggccaccgctcataccgcatttaccttcgtaaatcggtgagaagttggtgtaaggcacccacgcggagtcaaagtggatggatttcacatccagtgttttcttgatgaagtcggtgttgtacagcagaccatcataggtagagttggtaattacagcatgtaccggccaggttgcgtttggtgtttctttcacgcgcttagcaatggtagcgtgctggaattcactctgtgggataccaccaagaataccgtaagcgttacgggtcgggcggaaatagattggcgtaacatcgctcatcatcatcaggtgggtcagcgatttgtggcagttacggtcaatcagaatggtgctgcctgctggagcagagtacataccaacaattttgttcgcagtggaagtaccgttggtcaccatgtagctgcggtctgcgttaaagacgcgagcgatatactgttctgcttctttgtgtggaccactgtgatccagcagagaacccagttcagatactgaaatggaaatatcagatttcatggtattcggaccaaagaaatcatagaacaggctacctaccgggcttttctggaatgcagtaccgcccatgtgaccaggagtacagaaagtatatttaccttcacgaacatatttaaacagtgctttagtcagcggaggcagaatagtgttgatatattcgtcagtggtctgcttgatcttattagcaatatcttcagcagcacccagcgcatattcaaagaagctaatctgtaaacgcaggtcattcaggcttacatcgagagtggaatacgtattagcgaacgcgtacaacggcaggttctcgttcattttgctaatttcttcgcacagctcgagattatatttatcccagtcaaaaataacgccgcacagacgcgcattgttttcgatcagttttaataagtcgtcacggtcgttcgggtaaacaatctggaagttcagacgttcaagcgcgcgatgaagttcacggatgggttcttctttaaaataaacccccatgtgattcaatattgcaataacgttcatagtcatatctccaggtaaaaaaggcccctcccaacacatgggacaaaatgaaaggaggagcctcggaaaatacttttaattaatgtgcgttagacgcggtgtggttatccattgagtggctctggcgctcgtgcattttgcgagcgtagaacatcaggataatcaggctgacgatgaaggtacctgccagctcgaaggagcttgcgcccatcagcgcgatgaagcagaacacgcaacccagtacagagcagatcaggctgacaaagttgcggatgttaacgccttcaaaacgaatcaggtcaacgcaagagtagaaatacggcagcatagtcagcagtactgcgataccggtcagttcaccgaacaggtcagatgctttaccaccggcagagttcatcagagtgataaggatcatcagggcagtcattttcactgcagccagcagcagaccttttttcggaataccgttgctgtcgacttcaccataaactttcgggaagttaccgtcgttagcggcacgtacacctgcctggcctaccaacatcatccaggagcccagagaagtcaggcacgcaaaggcggtgaatgcagaaaccagcggcgcagcccagttaccgaggatagttgaagcactgattgcaaacggagcaccggaagccgccattacagaagacggatacataccggaaagcacctgagtcgcagcgatgtaaacaatacctgctaaaccagtacccagcatggttgccagcggaacggtacgtttcgggtttttaaccataccagtacttacagctgcggattcaacacccacgaaggcccacaggcagagcagaatacttttaatgatcgcatgaccatcagtggtatccgcagtattccagttagctgcataagttgccgcatcaaaccaatgccagccaacaatagcagtcatcaccacaggaataagaaccagcaccagaccaatagtggttaaacggcttacccaagtaccgccgagcatatttacaaaggtaaatacccagacgatagcaatacaggcgatacccgccggaacaggatcatttaatactgggaagaaggtggaaagataagatacagcggtaataccaatcgccaggttaccaatccagttagcatggtaataaagaacacctgtctgaaaaccaaatgcaggggaaatttctccggcataagcaattgggccaccttgttgcgggttttttgttgccagtcgggcatatacatacgccagcgacattgcaccaataatagagataatccaaccccagatagcaataccaccgatacttgctaggttcgcaggtaataatgcaataccgctccccatcatattaccggcaacaacaccggtacaggcaaatagcccgatcttcttggcagaactcatgctcttctcctaatttcatttttgaatttggagtccgggtcatgatgtataactatttcctgaccagaccaaactggcgataagattactcacgaaaaaaggattaatcctaaagattaggtgaaataacacaaaagtttctgtaagtgagaacttgaggttttttattaacacatcaggatcgcaagttgatatcatgaaaagataaacatttaatgtttacaatggattgcgtgacattctctggttaaatttatgtaataaaaattatgcggcaaataaattgccgcaacatattataccaacaggaacatacaaaaactcaacaacaaatatttccgagcataaatcaacccggagttacttattctgaagcaagaaatttgtcgagataaggtacaacataaggaacagaagtctggaatataccattttcaatccagtaaagggtgtttgcccctgggcgtaaattaaaggcggtgagatatgcatcagctgcttcccggttcatccccttcatttcataaaccttgccaagcaacacataatttagccaggacatttcaagatcaatgccagtatttatcgcctggtaagactcatctgttttaccttttaccagagcactgaccgcttttatttgatatataatggacaggttgttcaattccggcagtgtaacaatgttatctatttctgtgttcagtgctgctaattgtttttcatctaaaggatgttgagaatggcgcacgatatcaactaatgctttttctgctctcgcgtaggtaaattctggggatgattgaacaatctcacctaataattcactggcacggttcaatgatttatcatcgccatgcagtaaataatcatgtgcctgataaaaattagttaataacgcaccacgatgcggcaaaattttctggagcgtctcctgcattcgttgtggccacggttggtttaacgcttttgataaactctccagtaaatcattttgaatcgccagctgattaccgttagtgatgacataacgtttatccagcatggttgaaccatctgcattgtctaccaattttatcgacataaagcattgttgagcacggtattggcgctgattaacaaacgcaatagataatgttttaccggaactgctcggttcatcaatgttgtagttgattttgtcatgcaccataaaggtggagaaggtgttaagtgatgtcgccaccaaatcacccacgcctatcgcgtaagagagctgatacggggaactccagctgttacaacttttatttaccatattaatgtcaatatcgcgtggattgagcaaaatacgcgatttgctcataggaagacgtgtatcaagacttgaaaacgctaccagtgctacacagatacctaacgacaacaggaaaaaaaaccatacccaaaaggtagtgaatcgtttgcttttaactggggattgttcaggtggcgttgcggtgttttgaatgttaagactgtgggagggagaatctgtggcaggaaccgcctctggtatagggggaggcgaagatagcattatttcctctccctcttcttcgctgtaccagataaccggcaccattaatttatagccgcgctttggtacagtagcgatatagacaggactatcttcatcattatcttttaatgacttacgtagttctgagatactctgcgtcacaacgtgattggtgacaatacttctcttccagacattatcgataagttcatccctgctaagtacttcgccactgtgttgagcaaagaaaaccagaagatcgattaatctcggctcaagggtaagttgacgcccattgcggctaatttggtttatggacggagtaacaagccattcgccaacgcgaactacaggttgttgcataatagaaactcattcgaaaagggaatgatgcaatgataattgccacaacctatttttaccatctatagatgggtttatttacatattattggtgaatgcaagacgttatttttaccagccataaacttcttgattacatagtattacgaaaggattttactgagaaccagaagtaatattccttaccatcaaaattcatcatctttgccaaagaaaaatgttcagaaaataatccatggaaaattgtccggagcacttactattttaatggattgttagtctttgcatgagcaagcgaactgatacatttctctttgttctcattcagaaaatctcatcagtcgccgttcagaccggtgttgtgctttatggatgcgttacgctcctgatgacgtcatttgacgttcaacagcatcacggggccgcacgacatttcacgtcagttagtgctatagctcaggaacaaattttcccgaattgggatatgcccgcaaattgctggtgatgtggggagaatctggttgagttcggtagaattgatttggaggcagaacgcttaaatcgtggcgtcctgaaacgaaaaacggacctccgtggaggtccgtttatatgaatttggtgcccggactcggaatcgaaccaaggacacggggattttcaatcccctgctctaccgactgagctatccgggcaacggggcgcattaaaccgtaatctgcacatctcgtcaacctaatttcagtaaaagcgattcaactgcttaagattgcggcaaatcgcttcttttctgtgtttctgtcaggtcaatgcaccaccctggcggcagcgggcgaagcgcaggatatcttccgccagccgatgtgcagtgtcgacatccgcctggctacgattcaccagcattcggcttaaacagccttccagcaccagttccatctgctttgctaccatcgccggatcgtcaacttccagtgtggttaacagttcgtgggtgaaatcgtaggccgcgcttttttgctgatcggccagttgatgaatagggtggccaggatcgggataaaacgtacaggcagcgataaatagacagcccggatagcggttgtttttaacgcactccgataacgcctgataacgtgccagcagcttttgttcggcggtttgcgtttcgtccagcatcagctgacgacgccagacatctatctgttggctaagataacgcagcgcatcgtagaggattgcctctttgtctggccagaagcggcgtagctcgtccagtggataatccacacgttcagcaaccatctccagcgtggtgttggcaatcccttgtaattctaataatttcagggcttctcccagtacatcttcacgttgcacgctattttcctccgtctttcccactgcaagtgtcgttcacggttggcgatcgcgcaaatgtgcgctgaaggtttcagcatccataaagcccgtgacgcgtgcttgtggatgctcctggccttgtccgtcaaaaaagagaattgtcggtaggccaaggacattaagatgctttaacagcgccacatcttgtgcgtcgttggccgtgacgttggcctgaagtaagaccgtgtctgctaacgctttttgcacctgcgggtcgctgaaggtgtatttctcaaactctttacaggcgacgcaccagtcggcataaagatctaacatcaccggtttgcctttggcttcaacgagcgcctgatttaactcatctaccgttttgatttgtgtaaagttgagatgcgtctgagtttgcgcggtatgcgtcgcaccaaatgcccaatcctgaagtgggcgcacgctaaccaatgccgctgccagcagaataatttgcacaatacgcatccagccgcgtttagcctgtaggctggtgataaaggcccagccaaagaatgcgacacccagcgccgaccacaagcgtaatccccatacatcaccaatcactcgctccagcaggaagaccggcagtgcgaggatcacaaaaccaaacgcggttttgacttgttccatccacgggccgcttttcggcagcaagcggttaccaaagacggtaattagcatcagcggcaggcccatgcccaacgcatagagataaagcgtgccgccgcccagccacatgttcccgctttgggcgatatacagcagaatcgcgctaagcggtgcggtggtgcatggtgaacagatcagtccggcaatcgcccccataacaaacacaccgccaggtgagccgccctgttggcgattgctcatcaacgtgagacgtgtttgcagcgaagaggggagttgcagggtaaacaagccaaacattgacatcgccagcaaggtaaagacgatggcgaggccaatgagcacgtatgggtgctgtagcgccgcctggaactgtaaccctgcggcggcaaccaccagacccagcgccgtgtaggtcagcgccatcccctgcacataaataaaggtcagcaacaatgctctggcagtggagagccgctgtttaccacccagcacgatgccagaaatcagtgggtacattggcagcacgcatggcgtaaaggcgataccaataccgatcaacaacgcccagagcgcggaaaagggcaattgcgcggtgggctgctcttgctgcggaacagacacaggctgtggcgctgcgttgttggcgaccacttcgcttaacggaacggttttggtttctggcggataacagaaaccggcatcagcacagccctggtaggtgacagttaacgtcgctcccgcactcgcctggttgatggtgacgggaagcgtcagccgatcgcggtaaatctcgcttttgccgtaaaactcatcttcatgccagacgccttgcggcagctgcacgtcggcaattttcgcgtgttccggcgtaatgcggatctgtttacggtagaggtagtaaccgtctttgatctgccaggtcagattaaggtcatgttggttttgctgaaaatcaaaagcaaaggcttgatccgcggggacaaattgtgaacgtcccggcgcgtcgaataatccggcaaaaacggaagtgctgcaaagtagcaggatcagcgtaaagatgcgttgagccatgagaggtaatctgtgtctccgtgtgtaacaggtaaaaccagaagttccggggtttgatatggatgatgagacttcaggcattccagcagtgcctgctggtgagatacggtagtttttaaaatcatctgcacttcgtattcttgctccagcttaccttcccagtaatagagagaggtagcgccggggatcaaggtcgcgcaggccgccagtttttccgccagcactttggcggctaaatcctgggctgtcgcttcatctggtgccgtacatagcaccacgacagacgcggtattcgaacttttttcatcaagcataaacacctcgcaagaacagatggaaccgcaagagagaggtcactatacaacggacgggggaaggatgttagtcggcgggaaagaaagcggggcgtgaacgccccgcgattgatcattacagcatgaagctacccagcacgaagccgaagcaaacggccagggcaacacccagagtacccgggatgaagaacggatggttgaagacgaatttaccgatacgggtagtacccgtgtcatccatctgtaccgcagcaaccagcgtcgggtaggtcggcagaatgaacagaccagacaccgcagcgaaagaagcaacagcggtcagcggtgaaacgttcagtgccagagccatcggcatcagtgcttttgcggttgcagcctgagagtacagcagagcagaagcaaagaagaagatgacggccagcagccacggatgaccctgaatcacttcaccagcggtatctttgatccagtcgatgttgttggaaacgaaagtatcgcccagccacgcaacacccaggatacaaatacaggcgctcatacctgctttgaaggtgctggagttgaggatgttgtcggtatcgactttacagataacggtggtcagagttgcaacgctgagcatgatgatcaggattgcgttggtggtgttcatcagcggtttttcaaccagacccatgcttgggctgttgatgattgcatagataaccacgccaactacgcccagcaggaacagccagacggacgtttttgcaccggatttgatttcaatctgcttttcaccgcgcagttcaaccaggccctcttccagacgcttgcgataaatcggatcgtcagagagtttggagttgaacagcatagtgaccaggaaggacatcaccagaaccgccagcagggtggacgggatgaccacggagagcagatggaggtagctgatgccatgaccttccatcacggaagacatgtaaaccactgccgctgagattggcgatgcggtgatcgcaatctgcgcggataccactgcagtagacagcggacggcaaggtttaacgccttgttccttcgcaacttcagcgataactggcagtgtcgccagagagatgttgccagtaccagcaaagatagtcaggaaataggtcacgatcggtgcgaggatcgtgatgtatttcgggttacggcgcagcagcttttctgtctgatgaaccagatagtccagaccgccagcaacctgcatggcagaaatagcggcgataaccgccatgataatggagatgacatcgaacgggatgttaccgggtttaacgccaatagcggcaagaaccagcacccccaatccgcctgcaaaaccaatacctattccccccaatctggcgcccaagaagatcgccagcaaaactatgatgagttctacaactagcatattagccttccttgttttttaacaagttgatattagattgttatttttaagttactgctcacaagaaaaaaggcacgtcatctgacgtgccttttttatttgtactaccctgtacgattactgttcgctttcatcagtatagcgttttgctttgtaagccgggtgcatcagattctgtacggagaaaatatcgtcaagttccgcttcagtcaacagaccgcgttccagaacgacttcacgtacactcttaccggtttcggcacagattttacccacgatgtcaccgttgtggtgaccgatgaacgggttcaggtaagtaacgataccgatagagttgtaaacgtaaccttcgcacacttctttgttagcagtgatgccgttaatgcatttttccagcaggttgtagcaagcgttggtcagaatgtgaacggattcgaacatggcctggccaatgaccggctccataacgttcaactgcagctgacctgcttctgctgccatggtaacagtggtgtcgttaccgatgactttgaagcatacctggttaaccacttccggaacaaccgggtttactttagctggcatgatggaagagcccgcctgcagttccggcaggttgatctcgttcaggccggcacgtgggcctgaagagagcaagcgcaggtcgttacagattttggacatcttcacagccaggcgtttcagcgcgccgtgaaccataacataagcgccgcagtcagaggtcgcttcgatcaggtcttcagccggtacgcatgggaagccagtaacttcagccagttttttcactgccagcggagagtactctttcggcgtgttcagaccagtaccgattgctgttgcaccaaggttaacttccagcagcagttcagcggtacgttggatgtttttcacttcttctttcagcaggatgctgaaagcgcggaattcctgaccgagggtcatcggtactgcgtcctgcagctgggtacgacccattttcaggatgtcctggaattcgacagctttacgttcaaagccttcacgcagttggttaatcgcatctaccagcttaatcagggaagagtaaactgcgatacggaaaccggtcgggtaggcgtcgttagtggactgacatttgttaacatggtcgttcgggttcaggtactgatattcacctttttggtgacccatcagttccagaccgatattggccagcacttcgttggtgttcatgtttacggaagtacctgcgccgccctggtagacgtctaccgggaactgatccatgcattttccgttgttcaggacttcatcacatgcggcaatgatggcattcgctacacttttaggaatggtttgcagctctttgtttgccatagctgcggcttttttaaccattaccataccgcgaacaaattcaggaatatcactgattttgttgttgctgatatagaagttttcaatcgctctcagagtgtgaacaccatagtaggcatcagctggaacttccctggtacccaacagatcttcttcgatacgaatgttgtttgacatgtgaaccttctttttcaagctgccaatgatttgctttaaacacacagaatatatgtggtttcgaatgtttttcgaccgacgattatcccctgcatcgaccgaatacccgagatcatatgctgcttgaggatttctaccgtaatctggatcactttaagtgtcggtttttaccccttaattattaatttgtgaaatagatcaccgctttgggattactaccaaaaatagttgcgcaaacatcttgaaattttgctaatgaccacaatataagctaaacgcgattcgcaacccattcaggtagccggggttaaccggctgctattacaggagaaacctttgcgctggttaccttttattgccattttcctttatgtctatattgagatttcaatctttattcaggttgcccatgtattgggggtattgctgaccctcgtgctggttatattcacgtcagttatcggtatgtcactggtacgtaaccagggctttaagaatttcgtgctgatgcagcaaaaaatggcggcgggtgaaaacccagcggcggagatgattaaaagtgtttcgctgatcattgctggtttgctgcttttattaccgggcttttttaccgacttcctcggtcttctacttttattgccgccggtgcaaaagcatctgacagtgaagttgatgccgcatttgcgcttttctcgcatgcctggcggcggttttagcgccgggaccggtggcggtaatacttttgatggtgagtaccagcgaaaggatgatgagcgcgaccgccttgatcataaagacgatcgccaggattaatgtcgaaacgccggattatgtggttatgccattttccggcgtttttcgttttggcagcaacagccataaccccgccagcatgatcagcgcatagagacttttccagccgaccattgccagtaacagaacgcataacagcccgccaaccaccgccagtagtcgataacgtccttgcaataatttacagcctgccagcatgcataacagataaatcataataaagatgccattggcataaataataagagcgtccagattgatctctaaagcatgaatcaccaaagtgctcaccacacagcagccgagcaccgcattgagggcattattcgggatatggcgagaagagaggcgtgccaggtagtggtcaggattatgttgcgcctgcgaccagaccaggcgggcgaagctctgtatataaatgttgagactggcaaagcaggccagatagccaatcacgcaggcaatccataacgctcctacaccgaacaactgcactacaatttttggaagcgatgctgccgccgccattttttcaccataggcgtcgaagtgtaagacgactaccgtacagccccagtagactaatcctgccagcagcagaccaatcatcaaagcacgaggaaaatcacgctctggatttttaaattccgaggcgagatgggcaaatgcctccagaccgacaaaacaccagaacatcactgataacgcagcaaataacccggtaagttcgatattaccaggtgccggaaaggggatattcgcaggtttgatatcgcccgcccaccagatagcgacaatcagcgcgacgataagtccggcaataacggtttgtagattagcactggaactggcaccgcgagtaccgatataccacaccagcgccagcgtaccgagttctgccaacaacagttgccagctatgccagccaaacatcgcctggccgaacccggcggcaatttgtagtgcggcaggcaaacccacgggaatgaccgataaaaacagccagccggtgactcgctcaagccgcgaaccaaacgccataccgacgaagtgcgcgacgccgcctgcgctgggatagtggcgacccagaatcgcaaacacaatcgcaatcgggaacactaagataatcaaaacgggccacgcccacaggctgttattgcccgctaccagcgcagctaacgcaggaacggcaaacacgccagtgcctaataatgacgtcgatagcaggccaatgccctgggccagccccagttcttgtttgagtccactcatgggttgatgtccgattgcgcccaaattttgggcaactgcgtagattttcgatggtagcacaatcagattcgcttatgacggcgatgaagaaattgcgatgaaatgtgaggtgaatcagggttttcacccgattttgtgctgatcagaattttttttctttttcccccttgaaggggcgaagcctcatccccatttctctggtcaccagccgggaaaccacgtaagctccggcgtcacccataacagatacggactttctcaaaggagagttatcaatgaatattcgtccattgcatgatcgcgtgatcgtcaagcgtaaagaagttgaaactaaatctgctggcggcatcgttctgaccggctctgcagcggctaaatccacccgcggcgaagtgctggctgtcggcaatggccgtatccttgaaaatggcgaagtgaagccgctggatgtgaaagttggcgacatcgttattttcaacgatggctacggtgtgaaatctgagaagatcgacaatgaagaagtgttgatcatgtccgaaagcgacattctggcaattgttgaagcgtaatccgcgcacgacactgaacatacgaatttaaggaataaagataatggcagctaaagacgtaaaattcggtaacgacgctcgtgtgaaaatgctgcgcggcgtaaacgtactggcagatgcagtgaaagttaccctcggtccaaaaggccgtaacgtagttctggataaatctttcggtgcaccgaccatcaccaaagatggtgtttccgttgctcgtgaaatcgaactggaagacaagttcgaaaatatgggtgcgcagatggtgaaagaagttgcctctaaagcaaacgacgctgcaggcgacggtaccaccactgcaaccgtactggctcaggctatcatcactgaaggtctgaaagctgttgctgcgggcatgaacccgatggacctgaaacgtggtatcgacaaagcggttaccgctgcagttgaagaactgaaagcgctgtccgtaccatgctctgactctaaagcgattgctcaggttggtaccatctccgctaactccgacgaaaccgtaggtaaactgatcgctgaagcgatggacaaagtcggtaaagaaggcgttatcaccgttgaagacggtaccggtctgcaggacgaactggacgtggttgaaggtatgcagttcgaccgtggctacctgtctccttacttcatcaacaagccggaaactggcgcagtagaactggaaagcccgttcatcctgctggctgacaagaaaatctccaacatccgcgaaatgctgccggttctggaagctgttgccaaagcaggcaaaccgctgctgatcatcgctgaagatgtagaaggcgaagcgctggcaactctggttgttaacaccatgcgtggcatcgtgaaagtcgctgcggttaaagcaccgggcttcggcgatcgtcgtaaagctatgctgcaggatatcgcaaccctgactggcggtaccgtgatctctgaagagatcggtatggagctggaaaaagcaaccctggaagacctgggtcaggctaaacgtgttgtgatcaacaaagacaccaccactatcatcgatggcgtgggtgaagaagctgcaatccagggccgtgttgctcagatccgtcagcagattgaagaagcaacttctgactacgaccgtgaaaaactgcaggaacgcgtagcgaaactggcaggcggcgttgcagttatcaaagtgggtgctgctaccgaagttgaaatgaaagagaaaaaagcacgcgttgaagatgccctgcacgcgacccgtgctgcggtagaagaaggcgtggttgctggtggtggtgttgcgctgatccgcgtagcgtctaaactggctgacctgcgtggtcagaacgaagaccagaacgtgggtatcaaagttgcactgcgtgcaatggaagctccgctgcgtcagatcgtattgaactgcggcgaagaaccgtctgttgttgctaacaccgttaaaggcggcgacggcaactacggttacaacgcagcaaccgaagaatacggcaacatgatcgacatgggtatcctggatccaaccaaagtaactcgttctgctctgcagtacgcagcttctgtggctggcctgatgatcaccaccgaatgcatggttaccgacctgccgaaaaacgatgcagctgacttaggcgctgctggcggtatgggcggcatgggtggcatgggcggcatgatgtaattgccctgcacctcgcagaaataaacaaacccccgggcagaaatgtctgggggtttttcttttggtcatctttctagtataagattcagacacggacgacgcgagtggcgtccagctcattgattatggggaataacatgcacgtaaaatacttagcagggattgtcggtgccgcgctactgatggcgggttgtagctccagcaacgaattgagtgctgccggtcagagtgtacgcattgtggacgagcagccaggcgcagagtgccagctgattggtactgcgacaggtaagcaaagcaactggctttccgggcaacacggagaagaaggcggttctatgcgcggcgcagcaaacgatctgcgcaaccaggcggctgcaatgggcggtaacgtgatttatggcatcagtagcccgtcgcagggaatgttgtccagttttgtcccgacggatagccagattatcggtcaggtttataagtgcccgaactgatgtgatccagaggctgggtgacaaacgtataattgcctgatgcgcttcgcttatcaggcctacataaggcattgcaactgattgaatgcttgagaatttgtaggccggataaggcgtttacgccgcatccggcatgaccaacgatcacgttatcagtcatttcaggctggatggctccagcctcgcattagcaaagatgagattatttcgcctgtggtgcagttttgctggtggattgaacacgtaagtgatgcagcgcgcgtaagcattgatcctgggttagcggttgggcgttattcgccgctacggtgcgaacatagacctgacatggcacacccgcgagttttttcagtcgtgggctgaaatcaagcattcggcgagtgatcgcttctatttctttacccggcgttgcttcacgcgttttcaccactgcgccgctaaattgttctttgccactttcatctttaaagcggtaaagcaccgccagataatggtcgaacaagttatgtttccattccggttgggaataggtgtcatattccagattgccattgtcctggcagtcaacgtcgtataacggcaggaaatctaacagtgaggtaatacgtaatgccagttcacgcatttccgcattattaattgcatgaatgattgctcgcgccagcatttcaatctgcaactcattgacgactaactcacatttgctaccgtcatgtagcgttaatacgaaggtaagattttcgccttgattatcggtaagttccagcgtgttaacccgacgattaatatcggcatttttaagctcatcaaccagaatttctgggatgttttctgccattttcttaatgactttatcgcgagcttgctcatactgaaggtgtgcagcagcatccagtttatgcttttgatgcagacgactttccagcgcaatcagcaggtcgcgcagttccatgacagacataaagaacaacgattctttattgcgaggttctttaattttcagcgccagtgcaatgaaattattactcttgcgaataacaccggtattaacacccttgatgcttatggccatgtaggttctccctaaccatttctcaattaaataattaattttaatttataagccagataaatgggcttggtagtaatagttgttaaaataacataaatagccgtactcactctatataaacagaaaagaaaggttaattattggtgttagctatataaaaagtaacaacagcaatgcatatgaataattaaaggttatgcaacgggcaaagattaaacttcccagtttaatgacaggttgctgtacttgcgtttgttgctcttgccggatgcagcgtaaacgccttatccggcctacagttcattgcaaatccattcaatttcaatgcacgatgtaggcctgataagcgtagcgaatcaggcaattttaatgtttaacttccctgtttaatcagttactgctggcgtagctggagatccagcggcgttttgctgggttcgccgccaatttctcgcgccagtttcggcaccagatatcccgacaccagtgtcagcaactcacgcataatctgccgtgcttcgtcatcactcaccataaaatgcgccgcgccctgtactttatcgagcacatgcaggtaatacggcattacgccggcatcgaacaacgcattactcaggtttgccagcgtttgtgcgttatcgttcacatcacgtaacagaacgctctggttcagcaaagtaacgcctacccggcgcaacttagccatcgcctgacggaatgtttcatctacctcattggcatggttgatgtgattcaccagcaagatttgcagcgtagaacgggcaaagcattcaaccagcgcctcggtgatacgtgccgggatcacaatcggcagacggctgtgaatccgcagacgttttatatgcgggatggcttccagttgtgtgagcaaccagtccagctcgtgatctttcgccatcagcggatcgccgccggagaaaatcatctcgtccagttccggatgcgcagcaacatactcaagtgcagtttgccagttacgcttgttgccctgattttcggcataggggaagtgacgacggaagcaatagcggcaatttaccgcgcagccgcctttgaccagcaaaagcgcccggttgtggtatttatgcaacaaaccaggcactacgctgtgctgttcttccagtgggtcggtggagaatccgggcgcgatgacaaactcatcttgcgaggtaagtacctgacgcaaaagaggatcgtccggattgcctttctccatgcgatcgataaatgagcggggcacacgcagggcaaaaagctttttggcgctgcgtccggctaacagtttttcctccgcgtctatattcaaaagacgcagaagttcatcaggatcggtcacaacatcggcaagttgcgttaaccaatcttctctggatggggtatttagggttacaatatgcgccattttgtggcttagctaccaattaacaaatttcagagggccttatggcaacgtactatagcaacgattttcgtgctggtcttaaaatcatgttagacggcgaaccttacgcggttgaagcgagtgaattcgtaaaaccgggtaaaggccaggcatttgctcgcgttaaactgcgtcgtctgctgaccggtactcgcgtagaaaaaaccttcaaatctactgattccgctgaaggcgctgatgttgtcgatatgaacctgacttacctgtacaacgacggtgagttctggcacttcatgaacaacgaaactttcgagcagctgtctgctgatgcaaaagcaattggtgacaacgctaaatggctgctggatcaggcagagtgtatcgtaactctgtggaatggtcagccgatctccgttactccgccgaacttcgttgaactggaaatcgttgataccgatccgggcctgaaaggtgataccgcaggtactggtggcaaaccggctaccctgtctactggcgctgtggttaaagttccgctgtttgtacaaatcggcgaagtcatcaaagtggatacccgctctggtgaatacgtctctcgcgtgaagtaatgcggttgtggtgcggcctgcaggctgcaccatcacttattcaggtcagagatgatgaaacgccttatcgttcttgttttgcttgccagcacgctgctcacgggctgtaacaccgctcgcggtttcggcgaagacatcaaacatctcggcaactccatctctcgcgctgccagctaatttttcttctcttccgaaaaatcatcagattcccatcatttttggcgatgttgtctattattaatttgctataggcaaacataaataacattacctaaaaggaagacgttatggtgaagaagacaattgcagcgatcttttctgttctggtgctttcaacagtattaactgcctgcaacaccacgcgtggcgttggtgaagacatttctgatggcggtaacgcgatttctggcgcagcaacgaaagcgcagcaataagcaataacggtacgacagctgtgtcgtgccgtttgttttttctgcgatagtcacaaaggtaatagttgaaattcccctgccacctggcaaaatatccgttcaaccatcagctttgcaggacgacctgcaaacgcctcttttcaccggggacggccccaattctccggagcctgatatgtcctggattatcttagttattgctggtctgctggaagtggtatgggccgttggcctgaaatatacccacggctttagtcgtttgacgccgagtgttattactgtgacggcgatgattgtcagtatggcgctacttgcctgggcgatgaaatcgttaccagtagggacggcttatgccgtgtggacgggtattggcgcagtcggcgcggccataaccggcattgtgctgctcggtgagtccgctaacccgatgcgcctggcgagtctggcgttaatcgtattggggattattggtctgaaactcagcactcactaactaccaggctgctgtacccaaataaatttactgacatcaaacccttcccgggtcgcgactgccagcatctcctgtttcacttcgtcagaaatggttggcgtgcgggagagtatccacaggtagtcgcggtccgggccgcaaaccagcgcatggcggtattcccgatcgagtgcaataacgttataaccgccatagaaaggaccaaagaatgacactttcagcgcagcgcgagttggtgcgccggtaaagtacgctttcccttcactctgctgccacattcctctgtcagggttatagcctttattaatgacattcaggccgccgtcatcacgcaggctgtatgttgcggtgactttttccagtccacgttcaaagcggtgatcaaaacgggcaatctcataccaggtaccgagataacgtttggcgtcgaaattatttactacggtcacgccacgcggcggcgtaggagaactgcaggcaacgaccagaaatgcagctgtcgctgcggcaacgagagggagcaggcgcataaatgtttccttactggtttttttctaagtgtagatgacagcaaggaaaagcggagaaaaggtccgaaaattcggacccgatggaattttactgtagagcgttaagaatctgccaggcggcgtcgactctcgctggattgggatagtttttgtttgccagcatcacgatacccagctctttttctggaataaacgcgacatagctaccaaatccgccggtcgcccctgttttatgtacccatgatgcgcgtactgcaggagttgggggcgtaatcgcttttacggggcgtgctgccagtgcaattttattgtcactgccgttaatgatgctgtcaggatttaccggccagtccagcatttcccagcccaggccctgatacatatcgccggtttgccagtagcgagattgtgccagttgtatcccttgttgaagcgttttctcattgatatcaaggggttttaaattgctttgcacccagcgggccatatcttcaatggtcgacttcacaccataagcttcagcatctaacgccccaggcgaaacatgcactgccttaccttcgcgatatccccaggcgtaattcttttcttctgcgggcggtacattaatccacgtatggttgagtttgagtggctggaagacacgagtttgcatcgcctgctcaaaactcaaaccagacggcttcacagccagtgcgccgaacaaaccgatactggagttggcatacagacgttgtgttcctggagcccatgcaggctgccagttttgatagaagcgcagcaagtcgcttgaggatttcacctcatccggcacctgcaatggcaggccgccagcagtgtaggttgcgagatgtaatagtgtgatcccattccactgtttagcggtaagttcaggccagtattttgttgtgggatcgcttaacttgatttcccctcgagcaatagcgtcgccaccaagcacgccagtaaatgttttgctgaccgaacctaactcaaacaacgtttgctgtgtgacgggctgctttttggcgatgtccgcatagccccaggtaaagtaataaggtttaccctgataaattaccgccaccgccatacccgggatcttttgttgctctataagcggggtaattgtgcgatgcacaatatcgttgatttgttgaggggcagcaaatgtggagcaagaggcggtaattaataaggcgcagagcgtcgttttgaacatagggtctggtttccatacaaaacggcccgccataggcgggccggatttacattggcgatgcgttagattgtaacgacaccaatcagcgtgacaactgtcaggatagcagccagaccgtagaaaacccatttgcccgcaggtacgtggattttcagatcgtgcatcgcgtggtgcatacggtgtaaaccacaccacagcggcagaacgatcatcaggaacaggaatacgcgaccaatgaagctctgcgcgaacgccagaacgcgctcgtagctcagcgcatcacccggaaacaaccccagtggcagcagaatacccaccagcaggatcatcaccggcgcaatgatggcgctccacataccaccggccccgaagaggccccagaataccggttcgtcagaacgctttggatttggattaatcatctcaggctccttaccagtacagggcaacaaacaggattacgatggtggcaaccacagttaccgcccagagacttttgataattggctctggtcccattttttcgtcttttacaatgatattggccgctttcggtgccagttcaaaccaggttttggtgtgcagcagagctgccgccagagtgatcaggttaatgatcacgataaccgggttttgtaaaaagtcgacgaatcccgcccaggcttccgggccatttttcagggcaaacagcccgaaaatcagttcaatgctgaaccacacagccggaaccgccgtgccttcgcgcagcatgtaaaagcgataaaacggcaattttttccaccaggtggacgtcattggccgtacatacggtttacgtttagtcgtcatgttgcactccttagcgtggtttcagggtcgcgataagaaagtctttcgaactttctactttgccctgctgaatggccgcagccggatcgacgtgtttcgggcagacttcggagcagtagcccacgaaagtacagctccatacgccgttctggctgttcaactgcgccatacgctccttcttaccgtggtcgcggctatcttcgttataacgatgcgccagcgtaatggcagccggaccgatgaactctgggttcaggccaaactgcgggcacgcggcgtagcacaaaccacagttgatgcaaccggagaactggtgatacttcgccatctgcgccggggtctggatgttagtaccctgatccgcggtgcgggagttgccgatgatgtacggtttgatcgcttccagactttcgatgaagtgggtcatatcgaccaccagatcgcgttcaatcgggaagttagctaacgcttcaaccttcataccgtcggtgtaatcacgcaggaaggttttacatgccagttttggcacgttgttaaccatcatgccgcaggaaccacaaatcgccatacggcaggaccagcggtagctcaggtccggtgccaggttgtctttgatgtagcccagcgcatccagtaatgaggtagttgcgtcataaggcacttcatagaatgcgctatgcggtgcggtatcgacttccgggttatagcgcaccacctcaattttcaggtttttcatctcagccattcgccttctccttcttattggctgcttccgccttatcggctgcatccgcttcgccaccgtaaacgcgtttagctggcggcagcgtagtaatcttcacgtcgctgtactccaggcgagtcgtgccatcagcatcgcggaaggcgagggtgtgtttgaggaagttgacgtcgtcacgctcggtgcaaccttcgtccagacgctggtgcgcgccgcgggactctttacgtgccattgcggagtgcgccatacattcagcaacgttcagaccgtggcccagttcaatggtgtagagcaggtcggtgttgaacacgctggaagtgtcggtgatgcgcacgcgcttgaagcgttcctgcagctctgccagcttgtcgatggttttctgcatcagttccggcgtacggtagataccgcagccttcttccatagccaggcccatttcgtcgcggatcttcgcccagttttcgccgccatcctggttaaccagatctttcagacgttgttcaacgccagctgcctgcgcttcaattgccgcttcgttgccattaccggcagttgctgcacgctctgtcgcttgttcaccggccagacggccgaagaccaccagttccgccagggagttagaacccagacggtttgcaccgtgcagaccaacagaggaacattcacccacggcgaacagacctttaatgcgggtttcacagttctgatcggtttcgataccgcccatggtgtagtgtgcggtcggacgtaccggaatcggttctttaaccggatcgacgccaacgtacgctttcgccagttcgcagatgaacggcagacgttcatgcagttttttctcgccgaggtgacgcaagtcgagataaaccacatcgccacgcggcgtggagatggtgttgcctttacgccattcgtgccagaaggcctgagagactttgtcgcgtggacccagttccatatatttgtttttcggctcgcccagcggagtttccgggcccatgccgtaatcttgcagataacggtagccatttttgttgaccagaataccgccttcaccgcggcaaccttcggtcatcaggataccggaacctggcagaccggttgggtgatactgaacgaattccatgtcacgcagcggaacgccgtggcttagcgccatacccataccgtcaccggtaacgatgccgccgttggtgttgtaacgataaacgcgacccgcaccgccagtagccataacgaccgcgttagcacggatctgcaccagcgtgccttccatcatgttcattgctaccaggccgcgaacatgaccatcatcaaccagaatatccagcacgaaatgttcgtcaaaacgctggatctgcgggaattgcagagaggtctggaacagcgtgtgcagcatatggaagccggtcttatcggcggcgaaccaggtgcgctcgattttcatgccgccgaagcgacgtacgttgacgctaccatccgggcgacggctccatgggcatccccacagttccagttgggtcatttcggttgggcagtggtggacgaaataatccacgacatcctgctcacacaaccagtcgccacccgctactgtatcgtgaaagtgatattcgaagctgtcatgatcctgcgcgacagcggcggagcccccttctgcagcaacggtatggctacgcatcgggtatacttttgagattagtgcgatttttgcattcggatttgcctgcgcggcagcaattgcagcacgtaatcccgcgccaccggcgcctacaatggcaagatcggcttgaaaggtttgcacgacattcctccagattgtttttatcccacagccacgtacttcagggtaagtacctgaaagttacggtctgcgaacgctattccactgctcctttataggtacaacagtatagtctgatggataagtctgaaatttgacgagatcgatttttttagtgcgcaagagggctaaattatcactgaagatgattaatttaattactaaaccatcagatcgtgctttttttagtcactgcccaccgctgtttgattcctgcgtaaaatttgtctcgccgtcgcgttgcgagtagacttcgtgcccttgtcaaaaactggagatttaactatgagcgaaacggcatcctggcagccgagcgcatccattcctaacttattaaaacgcgcggcgattatggcggagatccgtcgtttctttgccgatcgtggagtgctggaggtggagacgccttgtatgagccaggcgacggtaaccgatattcatttggtcccgtttgagacacgtttcgttggccccgggcattcgcaggggatgaatctctggttaatgaccagcccggaataccatatgaaacgcctgctggttgccggttgtgggccggtattccagctgtgccgcagcttccgtaatgaagagatggggcgttatcacaaccctgagttcactatgctggagtggtatcgaccgcactatgatatgtaccggttgatgaacgaggtggacgatctcttacaacaggtgctggactgcccggcagcagaaagcctttcttatcaacaagctttcttgcgttatctggaaattgacccgctctctgccgacaaaacgcaactgcgggaagtcgcagcgaaactggatttgagcaatgttgctgataccgaagaagaccgcgacacgctgctacaattgctgtttacctttggcgtagagccaaatattggcaaagaaaaaccgacctttgtgtaccactttccagccagccaggcatcactggcgcaaatcagtaccgaagatcatcgggtcgctgaacgctttgaggtttattataaaggtattgagctggcgaatggtttccatgaattgacggatgcccgtgagcagcaacaacgctttgaacaagataaccgtaagcgcgcggcgcgcggtttgccgcagcaccccattgaccagaatctgattgaagccttgaaagtcggtatgcctgactgttccggcgtggcattaggtgttgatcgtctggtgatgttggcgctgggcgcggagacactggctgaagtcatcgcctttagcgttgaccgggcataattctgaaaaattactgaattaacagcgaagaatggcgtgataagcgccattctgtagcatatgttttcatttttccgttaaaggccacaatttaagactggatatttgatatcatccaggtatcaattctgtattggtttttacgctgcctgctcaatgttgcgcagtgcagttcagtgggcacgtgttatacacgcgctgaaatgaaggatggtttcatgcctcacacgataaaaaagatgagtctgataggactcatattgatgatctttacttccgtatttggatttgccaatagcccatcggcttattacttaatgggttatagtgcgattcccttttatatattttctgcattgttattctttattccattcgccttaatgatggctgaaatgggagctgcttatcgcaaagaagaaggcggtatctattcctggatgaataatagtgtcggaccacgttttgccttcattggtacgtttatgtggttttcctcttatatcatctggatggtgagtacctccgcgaaagtttgggtaccgttctcaacattcctctatggtagcgacatgacccagcactggcgtattgccggactggagcctacgcaggtggttggtctgctggctgtggcatggatgattctggtcaccgtcgttgcttctaaggggattaataaaattgcccgcattactgcggtgggcggtattgcagtaatgtgtctgaatttagtattgctgttagtaagcattactattttgttattaaatggtgggcatttcgcgcaggatattaatttccttgcatcaccgaacccgggttatcagtccggtctggcaatgctatcgtttgtggtatttgccatttttgcctatggcggaattgaagcggttggtggtctggtcgataaaacggaaaatccagaaaagaactttgccaaaggtattgtttttgccgctattgttatttcaatcggttattcgctggcaatatttttatggggcgtcagcacaaactggcagcaggtattaagtaatggttccgttaacctcggcaatattacctatgtgctgatgaagagccttgggatgacgctgggtaatgcactgcatttgtcacctgaagcgtcattgtcgctgggcgtatggtttgcgcgtattactggactttcgatgttcctcgcctataccggtgcgttctttacgctttgctattcaccgttgaaagccatcatccaggggacgccgaaagcattgtggccggaaccgatgacgcgcctgaatgcgatggggatgccgtctatcgccatgtggatgcagtgcgggttggttactgtcttcatcctgctggtttcgtttggtggcggtaccgcatcggcgttctttaacaagctgacgctgatggcgaacgtgtctatgacgcttccttacctgttcctcgcgctggctttcccgttctttaaagcacgtcaggatctcgacagaccgtttgtgattttcaaaacgcatttgtcggcaatgattgcgacagtggttgtcgtactggtggtgacatttgcgaacgtcttcaccatcattcaacctgtggttgaagccggagactgggacagcacattgtggatgattggcggccctgtcttcttctcgctgttagcgatggcgatttaccagaactattgcagcagagtggcaaaaaatccgcagtgggcggtggaataacccgatgccctatcgtctacctgacgatagggcgtaaagacaggaaatgttatggatgacaccagccgggacccggcaataaccgaagatgaaatcagggcgctgcaattttctgccggggatgtagcggaaatagagcagacgattctctcttttgtcgatgcctgccacacccgtaaagtggcgatggtggtgggtagcaccattaacaccctcaaagatcgcgatggtaaacggtggggaaacctgccggatatttattgcgcttatcttatccgatgtctggtttttcgcggggaattagtgggatacggcgatttgtttcgtatgcgctatagcgaaattaagcgaccggttaccttatgagtgcgcgcatgtttgtcttatgctgcatctggtttattgtggcgttcctctggataaccatcacttccgcgctggacaaagagtggatgattgatggacgcgggattaacaacgtctgcgatgtgttgatgtatctcgaagaagacgatacccgtgatgttggtgtgataatgacgttaccgctctttttcccttttctctggttcgctttgtggcgaaaaaaacgcggctggtttatgtacgccaccgcgctggctattttcggctactggctgtggcagttttttctgcgctatcagttttgtttgtgagccggattggttcatccggcacacaaacttacaaacttcccgcctgacgacctttgcccgcagacgtcagcgttctccccgtttgtttaccgttgaggctttccagacgcatctggaagggcgggaatggcatatcgataccgtgggcatggaagccagccagaatcagctggtggatctcatggcgtagcggcatacggtgacccatctcagcggcgtaaatacgcagctcgaaaatctgaatcccctgttgcagatccaccaggaagacttccggtgccgggttgtcgatcaccagcgagcagcgacgcgctgcggtgagcaggatttccgtcacttcttcgctattggcatcggcaggggccggtatcgtcaacaccacgcgcgtgaccgagtcagagagcgaccagttgataaactgctcggtaataaacgccttgttcggcacgattatctctttacggtcccagtcgctgatggtggtggcgcgggtgttaattttcgtcacgctaccggtgagatcgcgaattgtcaccgtatcgccaatgcgaatcggtttttcgaacaggataatcagaccagagataaagttggcgaaaatttcctgcaaaccaaaaccgagaccaacaccgagcgcggcaaccagccactgcaatttcgaccactcaataccaatcattgagaagccgaccagcccgccaatcagcatcagcagatatttggtgatggtggtgatggcgtaacccgtacccggcgttaaatccaggtgctgcaaaatcgccagttccagcagcgcgggcaagttgcgcaccagctgcgtggtgatgataaacaccagaatggcaatcagcaccgcaccgagggtaattggctccagactttctacgccctgtaccgtggaggtgacatcccacagcgaaatattttcgaggaagccgaaagcggaatggatttctgaccacagcacaatgacagaaagcagggcgatcaacatcaaaattgagcgcaccagccgcaaggattgcgcactgatggcatcgagatcgacttcgctttcatcgacttcaattgctccttccgggctactgtgatgatgcgcttcctcttcgccacgcgcacgttgcgctaacatctctgcccggcgatgcttcgcccgatcaaacgccagcctgcggcgctggatcagcatccagcggcggataacgtgataaaccaccagtagcaggaaccagatggcaaccgaggtttcaagcctcgctaacagcgcctgtgccgttgccagataacccaccgccgacgccagaatggcaaccaacggcgcgccaatcatcatgttccacagcatatggttggtaatgttgtcgccgctgccctctttgttgagatacagcggaatcccggcctttttcaggctgagggtgaccaccgccagcgcaccgcaaatgaggataaagcaaagccgtcccagcgaaccggagaattcacggtcgtcgaggttatcgaacatcatcagcgccataatcagcggcacaataagcccgatgctcatcaggtagtagcgcatcccacgggaaacacgttcgcgcggccagccaaaatgagcgataaacaagccgttcgggcgggcaaaggtggcgcaaatcatcactacccacagcagcggcacggtggccgttacaccatcgccaatcgcgaccgccagcggataaggccacgcctcgcgcaagccgtaacccagcgtcatccacagcaccggtaacggtgacgcgacgagaatcgaccagaaaagagtgcgcaacgtcagccagaagtgatcctgagtcactttgccaactttcgccgccgaacgttcaagaaaacgggtgaaatagcggcgcgagtaaatactgcaaccgaccagaatcaacgcgccaaacagcggcaaaattgtctctttgctggtcagcatcatcacactggctttgcccaactgactgaaggtgtccagcgaaatgagacgacgcagatcctgggcgatttccagcggccaggcgatggtcatcgggcgcacgtcagaggtccagaacagatagcggtgcgttgcttcgttcacctctttcagcgcatcctccagttgcccgttggagactttcagcttggtcagttccaatagtagcgtgtcgccaccctgcaacaatgagttcagcaactcacgctgagtgcgcagttgtgcttccagaatacggttttgctcggcagtcagcggctgaccgtcggcctgatgaatttgccgtagcagcggctgtttattaagcagatcctcataacgtaaccgttgcacacgcaactgcgccatttcggtatcaagctgttgtggtttcggcatttccggcagccgtgccacctgcgcccgcagcgcttcgccgagcagattggacgatcccagccattgcgactgttcacgcagcgtattcaacgcctgccggacctgtaacgtctggctggcagcctgacgctgttgcgaggcaacgagatccatccgctgcgcctgttgattcaaagccgccgatagttcgcggttaattttgaattgcgcgacgatatctttcggcaaatcggcgctgttttctgccagcaattcggtactttccagcgcccgctccgcctcaagctgacgttggctgtttaattgattacgcaaggcctgcaaatacgcatccagttgctggctctctttttccgccagctctgagcgtaagcgcgctaattcctggcggttattggcagacagctgcgccagctccagttcatcaacgagcgccttaagacgtgcagagtcagactgcaacgcgaaattttgtgcctgattgagcggagtattgccggtaagcgttcccaggcggcgctcgatctcatttaactgacggcgggcgtcggtttgctgttgcggcagttgattcagcgaatcggcaatctcgcgggcgcgctcctgctcttgctgggcctgacggcttttatccagcaactggctgctgacctggagaatttcctgattcagcgcgtcggtagacattcccggcgacacgctgcgcggctcgtcacgcatgttgtttaattgtgcgcgcagagtagcggagagtttcggataattatcgataacttgctgatattgtttgatgcgctcaagggaaccttttcgttcctcaagcgcatttaaggcagactggagcgcctctacgacttccggctgtgcgggtttcgccgcttttgcctgctccagttcctgagtgatttgtttgctatcgggggccgtcgcggcgtacgccccccaactgaggcaccaggccatcagaaaagtgataatcaggcgcacgtcagcgtttcctttgatggattagacctggtcttttttgtcgtcaaccaatgggctggcgtcgtgttctgcttcgatctcttcagcaggaagcggggcaggttcagcgtctggcgtaacaaaggtttcggtagatactgccagcggctggccaattttcgtgacagacaggctttccagttgctcaaccagattcactttacccggtgcaaacaggttgataacggtggaaccgagtttaaagcgacccatttcctggcctttcagcagtgccacagaaccgtcgttttccccggcaggccaggtccagcgcttgatgataccttcgcgcggcggcgtaatggtgcccgcccagaccgtctcaatgctgccaacaatcgtcgctccgaccagaatctgcgccattgggccaaattcggtatcgaaaaggcaaatcacgcgttcgttacgggcaaacagattcggcacgttctgagccgtgagatggttaacggagaagagatcgcccggcacgtagatcatctcacgcagaataccgttgcacggcatgtgtacgcggtggtagtcacgcggggagaggtaagtggtcacaaacgtaccgttgcggaacaggtccgccatcagatagttgcctgccagcagggcttcgaggctgtagttgtggcctttggcttgcaggattttatcttcttcgattttacccaactggctgataacgccatcggcaggcatgaccagtacattcggatcggtatcgattgggcgtacttcgtcacgcagcggacggacaaagaattcgttaaaggtgcggtagctggcggtgtccggcttttgcgcctctttcatgtcgaccttgtagtatttaacgaacagatcgataaccagttttgtcagccatcctgcccgcttgcttgcgccccaacccgccaggcgagtaagccatagtttcggcagaatgtactgtagcgaaagtttaaatgaatttaacaaggtagcctccaggccattgttttgtcgttcctgatccggcctacatgccggatcctgaaaaaaaggggacgattctaacgacggttagcttaattgtcagtcatccgtatcagaaaagtttttacgcgtttttacctgcgccatgctttccagaatacggtgatagttttcgaaacgggtttccgcgattttcccttcctcaaccgcttcccggatagcgcagcccggatcggtatcgtgtttgcaatcgcgatatttacacagacctaaatagtcatggaattcgacaaagccctgagtgatttgttccggctccaggtgccagaggccgaactcacgcactcctggggagtcaatcacatcaccgccgtgcgggaagtgatacagccgagcggcggtcgtggtgtgctgaccgagccccgagttgtcagagatatcgttggtcaggatctctttttgcagccccagcaacgcattcagcaggctggatttgccgacgccagactgcccggcaaaaatgctgatgcgcccggtcaacgcctcttccagcggttttagcccatcctgagtatggctggaaaccatcaatacgcgataaccgatattgcggtagatatccatctgctcgttgacgaacgccatgccttcgtcgtccagcaggtctatcttgttgagcacaataatcggctcaatctgcaaggtttcgcaggccaccaggtaacggtcgataatattgagcgacagctccggcaaaatggcggagacaatgacaatctggtcgatgttggcggcaataggttttacgccgtcgtagaaatccggacgcgtcaacaccgaggtacgctcatgcaccgcttccacgatccctttgacatttacgccttccgccgccggtttacccggacgccagactacgcggtcgccggttaccagcgaacggatggtacggcgaatattgcagcggtgaacgtcgccatcggcggattccacatcagcgtgcataccaaagcggctgatgacgataccttcatcaggctcgccaaacagattgtcgtcgtagtcgggcttctccttagacgttttaagacgacgctggtgattggcgttcacgcggcgctgctggcctttggagagtttatttttactcaatcgtacagactcctggtcgcccctgatgggcaaaacatctatgatacacgcaattgtggatcaatatagtcactgtgaatgggtggaaaatagcatgagtgccaatgaaaacaacctgatttggatcgatcttgagatgaccggtctggatcccgagcgcgatcgcattattgagattgccacgctggtgaccgatgccaacctgaatattctggcagaagggccgaccattgcagtacaccagtctgatgaacagctggcgctgatggatgactggaacgtgcgcacccataccgccagcgggctggtagagcgcgtgaaagcgagcacgatgggcgatcgggaagctgaactggcaacgctcgaatttttaaaacagtgggtgcctgcgggaaaatcgccgatttgcggtaacagcatcggtcaggaccgtcgtttcctgtttaaatacatgccggagctggaagcctacttccactaccgttatctcgatgtcagcaccctgaaagagctggcgcgccgctggaagccggaaattctggatggttttaccaagcaggggacgcatcaggcgatggatgatatccgtgaatcggtggcggagctggcttactaccgcgagcattttatcaagctgtaaaatttttcctggtcacgtaagcgccggaatccacttgcggcggcgtgattttgacgctaaattgaacgtcttgctgataatttcagcacttgagataaaaacgcaaaaaaaacttttttggggggttgcagagggaaagatttctcgtataatgcgcctcccgtaacgacgcagaaatgcgaaaattacgaaagcaaaattaagtagtacgcgggaatagctcagttggtagagcacgaccttgccaaggtcggggtcgcgagttcgagtctcgtttcccgctccaaaatttgaaaagtgctgcaaagcacagaccacccaagcgggaatagctcagttggtagagcacgaccttgccaaggtcggggtcgcgagttcgagtctcgtttcccgctccaaaatttgaaagtgctgtaaggcacagaccacccaagcgggaatagctcagttggtagagcacgaccttgccaaggtcggggtcgcgagttcgagtctcgtttcccgctccaaattcttctctcaataaaatatccacagcgacgcgatgcgttattgctggtttttgttgtctctgacaaactcttgtaaacagagttatccacagcctcaggctgtaatcttaatttcaaagaaacttcgcacggtgaatagtatttttttaacctattgatagataagttaaaaattaagattccgttttgtcgagtcgatcacttgacgattttattcgtcttgaattgcaatgcgtttttatttttattcacaagctgtggatgaatcaggcgtcacgcggtaaccctttttcaatcacccgaaccagacgctgttttttcggcaattgcacttcgactatgcacgcatttcgtctctctatttgctgcgcaatcgcccacgctatgtgctcatcgagaagtgggtgctcacctttacgactttccagcgctgtcaaaatcgtttcatcccaaggggcattgcctaatgctacggcgatattacgcagccaacgcaggtgaccaatacgacgaatcgccgatccttccgtgacttttaaaaacttctcttcgctccaggcgaataactcaatgagttccggtgcgtgtagcggcttacgcgggctgaaatcctcttctgtggtgagttgtgaatagcgattccacgggcagataagctggcagtcatcgcaaccgtaaatacggtttcccattaacggtcgcaactcttccgggatcgccccttcaagttcgatggtgagataagagatacagcggcgagcatcgacggtatatggctcgacgatggcaccggtcgggcaaatcgtcatacaggccacgcatttgccgcatccttcctcgactggttgatccacgggcagcggaatatcgaccagcaattcgcctaaaaagaagaacgaaccggcctcgcgattgaggataagtgagtgcttacctgtccagccgagcccagctttttcagctaacgggcgctcgagaataggcgcagaatcgacaaacggtctaaaattcagcgaaacacaatgttgctgaatcatctcgcccagctttttgagtcggttgcgcagaagtttgtgatagtcacggcccagcgcataacggctaacatagccgagtttggggtttttcagcgtgctggcaaatgcggcgttagcaggaaggtaattcatccgcacgctgatcacgcgcagcgtaccgggcaataactcatgagggcgagcgcgcagcataccgtgacgtgccatccagtccatttcgccgtggtattgtttgtccagccatgcttgcagtttgggctcggactcgctgagatcggtatcggtaatacctacctgctgaaagcccagttccagcccccactgtttaattttttgcgctaactgattgagatcgaggggctctgacatgacggaccatacaatgaagaaaaaccccgtaagtataccacacaccgtctggtacgccgacgatatccgccgcggagaacgcgaggcggcagatgtgctggggctcacactctatgagctgatgcttcgcgctggcgaggccgcattccaggtgtgtcgttcggcgtatcctgacgcccgccactggctggtgctgtgcggtcatggtaataacggcggcgatggctacgtggtcgcgcgactggccaaagcggtcggcattgaggtcacgttgttggcccaggagagcgacaaaccgttgccggaagaggccgcgctggcacgcgaagcatggttaaacgcgggtggcgagatccatgcttcgaatattgtctggcccgaatcggtagatctgattgttgatgcgctgctcggtaccggtttgcggcaagcgccccgcgaatccattagccagttaatcgaccacgctaattcccatcctgcgccgattgtggcggttgatatcccttccggcctgctggctgaaactggcgctacgccaggcgcggtgatcaacgccgatcacaccatcacttttattgcgctgaaaccaggcttgctcactggaaaagcgcgggatgttaccggacaactgcattttgactcactggggctggatagttggctggcaggtcaggagacgaaaattcagcggttttcagcagaacaactttctcactggctaaaaccgcgtcgcccgacttcgcataaaggcgatcacgggcggctggtaattatcggtggcgatcacggcacggcgggggctattcgtatgacgggggaagcggcgctgcgtgctggtgctggtttagtccgagtactgacccgcagtgaaaacattgcgccgctgctgactgcacgaccggaattgatggtgcatgaactgacgatggactctcttaccgaaagcctggaatgggccgatgtggtggtgattggtcccggtctgggccagcaagagtgggggaaaaaagcactgcaaaaagttgagaattttcgcaaaccgatgttgtgggatgccgatgcattgaacctgctggcaatcaatcccgataagcgtcacaatcgcgtgatcacgccgcatcctggcgaggccgcacggttgttaggctgttccgtcgctgaaattgaaagtgaccgcttacattgcgccaaacgtctggtacaacgttatggcggcgtagcggtgctgaaaggtgccggaaccgtggtcgccgcccatcctgacgctttaggcattattgatgccggaaatgcaggcatggcgagcggcggcatgggcgatgtgctctctggtattattggcgcattgcttgggcaaaaactgtcgccgtatgatgcagcctgtgcaggctgtgtcgcgcacggtgcggcagctgacgtactggcggcgcgttttggaacgcgcgggatgctggcaaccgatctcttttccacgctacagcgtattgttaacccggaagtgactgataaaaaccatgatgaatcgagtaattccgctccctgatgagcaggcaacattagacctgggcgagcgggtagcgaaagcctgcgatggcgcaaccgtaatctatctgtatggcgatttaggcgcaggtaaaaccacctttagccggggctttttacaggctctgggtcatcagggtaatgtcaaaagccccacttatacgctggtcgaaccctatacgctcgacaacttaatggtctatcactttgatttgtaccgccttgccgatcccgaggagctggagtttatggggatccgcgattattttgccaacgatgccatctgcctggtggagtggccacaacaaggtacaggtgttcttcctgacccggatgtcgaaatacacattgattatcaggcacaaggccgtgaggcgcgcgtgagtgcggtttcctctgcgggtgaattgttgctggcgcgtttagccggttaacctttgaaaggtggcgggatgatgtatcgcatcagaaattggttggtagcgacgctgctgctgctgtgcacgccggtgggtgccgcgacgctctctgatattcaggtttctaacggtaatcaacaggcgcggataacgttgagttttattggcgatcctgattatgcgtttagccatcaaagcaaacgcaccgtggcgctcgatatcaaacaaacgggcgtgattcagggactgccgttgttgttcagcggcaataatctggtgaaggcgattcgctctggaacgcctaaagatgcacaaacgctacggctggtggtcgatcttaccgaaaacggtaaaaccgaagcggtgaagcggcagaatggcagcaattacactgtcgtctttacgattaacgccgatgtgccgccaccgcctcctccgccgcccgtggttgcgaaacgcgttgaaacgcctgcggttgtcgcaccgcgcgtcagcgaaccggcgcgcaatccgtttaaaacggaaagtaaccgcactacgggtgttatcagcagtaatacggtaacgcgtccggcagcgcgcgcgacggctaacactggcgataaaattatcatcgctattgatgccggacacggcggtcaggaccctggcgctatcggccccggtggtacgcgggagaaaaatgtcaccatcgccatcgcgcgtaaattgcgtactttgctcaatgacgatccgatgtttaaaggcgttttaacccgtgacggggattactttatctcggtgatggggcgcagtgatgtggcacgtaagcaaaacgccaatttcctcgtgtcgattcacgctgatgccgcaccgaaccgcagtgcgactggcgcttccgtatgggtgctctctaaccgtcgcgccaacagtgaaatggccagctggctggagcagcacgagaaacagtcggagctgctgggtggggcgggtgatgtgctggcgaacagtcagtctgacccctatttaagccaggcggtgctggatttacagttcggtcattcccagcgggtagggtatgatgtagcgaccagtatgatcagtcagttgcaacgcattggcgaaatacataaacgtcgaccagaacacgccagccttggcgttctgcgctcgccggatatcccatcagtactggtcgaaaccggttttatcagcaacaacagcgaagaacgtttgctggcgagcgacgattaccaacaacagctggcagaagccatttacaaaggcctgcgcaattacttccttgcgcatccgatgcaatctgcgccgcagggtgcaacggcacaaactgccagtacggtgacgacgccagatcgcacgctgccaaactaaggacgattgatgccaattcaggtcttaccgccacaactggcgaaccagattgccgcaggtgaggtggtcgagcgacctgcgtcggtagtcaaagaactagtggaaaacagcctcgatgcaggtgcgacgcgtatcgatattgatatcgaacgcggtggggcgaaacttatccgcattcgtgataacggctgcggtatcaaaaaagatgagctggcgctggcgctggctcgtcatgccaccagtaaaatcgcctctctggacgatctcgaagccattatcagcctgggctttcgcggtgaggcgctggcgagtatcagttcggtttcccgcctgacgctcacttcacgcaccgcagaacagcaggaagcctggcaggcctatgccgaagggcgcgatatgaacgtgacggtaaaaccggcggcgcatcctgtggggacgacgctggaggtgctggatctgttctacaacaccccggcgcggcgcaaattcctgcgcaccgagaaaaccgaatttaaccacattgatgagatcatccgccgcattgcgctggcgcgtttcgacgtcacgatcaacctgtcgcataacggtaaaattgtgcgtcagtaccgcgcagtgccggaaggcgggcaaaaagaacggcgcttaggcgcgatttgcggcaccgcttttcttgaacaagcgctggcgattgaatggcaacacggcgatctcacgctacgcggctgggtggccgatccaaatcacaccacgcccgcactggcagaaattcagtattgctacgtgaacggtcgcatgatgcgcgatcgcctgatcaatcacgcgatccgccaggcctgcgaagacaaactgggggccgatcagcaaccggcatttgtgttgtatctggagatcgacccacatcaggtggacgtcaacgtgcaccccgccaaacacgaagtgcgtttccatcagtcgcgtctggtgcatgattttatctatcagggcgtgctgagcgtgctacaacagcaactggaaacgccgctaccgctggacgatgaaccccaacctgcaccgcgttccattccggaaaaccgcgtggcggcggggcgcaatcactttgcagaaccggcagctcgtgagccggtagctccgcgctacactcctgcgccagcatcaggcagtcgtccggctgccccctggccgaatgcgcagccaggctaccagaaacagcaaggtgaagtgtatcgccagcttttgcaaacgcccgcgccgatgcaaaaattaaaagcgccggaaccgcaggaacctgcacttgcggcgaacagtcagagttttggtcgggtactgactatcgtccattccgactgtgcgttgctggagcgcgacggcaacatttcacttttatccttgccagtggcagaacgttggctgcgtcaggcacaattgacgccgggtgaagcgcccgtttgcgcccagccgctgctgattccgttgcggctaaaagtttctgccgaagaaaaatcggcattagaaaaagcgcagtctgccctggcggaattgggtattgatttccagtcagatgcacagcatgtgaccatcagggcagtgcctttacccttacgccaacaaaatttacaaatcttgattcctgaactgataggctacctggcgaagcagtccgtattcgaacctggcaatattgcgcagtggattgcacgaaatctgatgagcgaacatgcgcagtggtcaatggcacaggccataaccctgctggcggacgtggaacggttatgtccgcaacttgtgaaaacgccgccgggtggtctgttacaatctgttgatttacatccggcgataaaagccctgaaagatgagtgatatcagtaaggcgagcctgcctaaggcgatttttttgatggggccgacggcctccggtaaaacggcgttagccattgagctgcgtaaaattttaccagtagagttgataagcgttgattctgcccttatttacaaagggatggatatcgggacggcgaagccgaacgctgaagagttactcgccgcgccgcaccgattgctggatattcgcgatccgtcgcaggcttactcggctgctgattttcgccgcgatgcgctggcggaaatggccgatatcaccgcggcggggcggatcccactgttagtgggcggtacgatgttgtatttcaaggcattgctggaagggttgtcgccgctaccgtcggcagacccggaagtacgggccagaattgagcaacaggcggcagagcaaggttgggagtcattgcatcgtcaacttcaggaggtagatccggttgcggcagcaaggattcatccaaatgatccacaaaggctttcccgggcactggaagtttttttcatttcgggtaaaactttaacggaactgacgcaaacgtcaggagacgctctaccgtatcaggtgcatcagttcgccatcgccccggcgagccgtgaactgctccatcaacgcattgagcagcgttttcatcagatgttggcttcaggttttgaagcagaagtccgggcgctttttgcccgaggagatttgcatacggacttgccttccattcgttgcgtgggttatcgccagatgtggtcttaccttgaaggcgaaatctcatacgatgaaatggtttatcgaggtgtttgcgccacgagacagttggcgaagcggcagataacctggctgcgtggttgggaaggggttcactggcttgacagtgaaaaaccagaacaggcgcgtgacgaagtattacaggttgttggtgctatcgcaggctgaatgtgtacaattgagacgtatcgtgcgcaattttttcagaatcgaaaggttcaaagtacaaataagcatataaggaaaagagagaatggctaaggggcaatctttacaagatccgttcctgaacgcactgcgtcgggaacgtgttccagtttctatttatttggtgaatggtattaagctgcaagggcaaatcgagtcttttgatcagttcgtgatcctgttgaaaaacacggtcagccagatggtttacaagcacgcgatttctactgttgtcccgtctcgcccggtttctcatcacagtaacaacgccggtggcggtaccagcagtaactaccatcatggtagcagcgcgcagaatacttccgcgcaacaggacagcgaagaaaccgaataaggtttcgggctgtttttttacacggggagccagcgatcctgcgttccccgctgatctatttagagggttatacgcttgtttgaccgttatgatgctggtgagcaggcggtactggtacacatctattttacgcaagacaaagatatggaagacctccaggagtttgaatctctggtctcttccgccggtgtcgaagcattgcaggtgattaccggtagccgtaaagcgccgcacccaaagtattttgtaggtgaaggtaaagcagttgaaattgcggaagctgtcaaagcgacgggtgcttcggtcgttctttttgaccatgccctgagcccggcgcaagagcgtaacctggagcgtttgtgcgagtgtcgtgttatcgaccgcaccggccttattttagatattttcgcccaacgtgcgcgtacccatgagggtaagttgcaggttgagctggcgcagctgcgccatctggctacgcgcctggtgcgtggctggacccaccttgaaagacagaaaggcgggataggtttgcgtggtccgggtgaaacccagctcgaaaccgaccgtcgtttgttgcgtaatcgcatcgtgcagatacagtcgcgcctggaaagagttgaaaagcagcgtgagcaggggcggcaatcgcgtatcaaagccgacgttcctactgtttcgctggtgggatataccaacgccggtaaatctacccttttcaatcgcatcaccgaagcgcgggtctacgcggcagaccagttgtttgccaccctcgacccgacgttgcggcgtattgacgttgcagatgtcggtgaaaccgtacttgcagataccgtagggtttattcgccacctgccgcacgatctggtggcggcatttaaagccacgttacaagagacgcggcaagccacattactgctgcacgtcattgatgcggcggatgtgcgtgtacaagaaaacatcgaagcggtgaatacggttcttgaagagatcgacgctcacgagatcccaaccctgctggtgatgaacaagatcgatatgctggaagatttcgaaccgcgtattgatcgggacgaagagaacaaaccgaaccgtgtctggctttccgcacagaccggagcggggataccacagctttttcaggctttgacggagcggctttccggcgaggtggcgcagcatacattgcgtctgccaccgcaggaagggcgtctgagaagtcgtttttatcagcttcaggcaatagaaaaagagtggatggaggaggacggcagcgtaagtctgcaagttcgtatgccgatcgttgactggcgtcgcctctgtaaacaagaaccggcgttgatcgattacctgatctaacggcgtagcgtctgaagcgtggagtcatatcctctggcgtcgaaagacaacagggatcaccgcataacaaatatggagcacaaacatggcgtggaatcagcccggtaataacggacaagaccgcgacccgtggggaagcagcaaacctggcggcaactctgagggaaatggaaacaaaggcggtcgcgatcaagggccacctgatttagatgatatcttccgcaaactgagcaaaaagctcggtggtctgggcggcggtaaaggcaccggatctggcggtggcagttcatcgcaaggcccgcgcccgcagcttggcggtcgtgtcgttaccatcgcagcggcagcgattgtcattatctgggcggccagtggtttctataccattaaagaagccgaacgcggcgtggtaacacgctttggtaaattcagccatctggttgagccgggtctgaactggaaaccgacgtttatcgacgaagtcaaaccggtgaacgtggaagccgtgcgtgaactggccgcttctggtgtgatgctgacgtcggacgagaacgtagtgcgcgttgagatgaacgtgcagtaccgcgtcaccaatccggaaaaatatctgtatagcgtgaccagcccggatgacagcctgcgtcaggctaccgacagcgccctgcgtggagttatcggtaaatacaccatggaccgcattctgacggaaggtcgtaccgtgattcgtagcgatactcagcgcgaactggaagagacgattcgtccgtatgacatgggtatcacgctgctggacgtcaacttccaggctgctcgtccgccggaagaagtaaaagcggcgtttgacgatgcgattgccgcgcgtgaaaacgaacagcaatacattcgtgaagcagaagcgtataccaacgaagttcagccgcgtgcgaacggtcaggcgcaacgtatcctcgaagaggcgcgtgcgtacaaggcccagaccatcctggaagctcagggtgaagtggcgcgctttgctaaacttctgccggaatataaagccgcgccggaaattactcgcgagcgtctgtatatcgagacgatggaaaaagtgttgggtaacacccgcaaagtgctggttaacgataaaggtggcaacctgatggttctgccgttagaccagatgctgaaaggtggtaacgcccctgcggcgaagagcgataacggtgccagcaatctgctgcgtctgccgccagcctcttcctccacaaccagtggagcaagcaacacgtcgtccaccagtcagggcgatattatggaccaacgccgcgccaacgcgcagcgtaacgactaccagcgtcagggggaataacgatgcgtaagtcagttatcgcgattatcatcatcgtgctggtagtgctttacatgtctgtctttgtcgtcaaagaaggtgagcgcggtattacgctgcgttttggtaaggtactgcgtgacgatgacaacaaacctctggtttatgagccgggtctgcatttcaagataccgttcattgaaacggtgaaaatgctcgacgcacgtattcagaccatggacaaccaggccgaccgctttgtgaccaaagagaagaaagacctgatcgtcgactcttacatcaaatggcgcatcagcgatttcagccgttactacctggcaacgggtggtggcgacatttcgcaagcggaagtgctgttgaaacgtaagttctctgaccgtctgcgttctgaaattggtcgcctggacgtgaaagatatcgtcaccgattcccgtggtcgtctgaccctcgaagtacgtgacgcgctgaactccggttctgcgggtacagaagatgaagttactaccccggcggcagataacgccattgccgaagcggcagagcgcgtaacggctgagacgaagggcaaagttccggtcatcaacccgaacagtatggcggcgctgggtattgaagttgtcgatgtgcgtatcaagcagatcaacctgccgaccgaagtgtctgaagcgatctacaaccgtatgcgcgccgagcgtgaagcggtagcgcgtcgtcaccgttcacaaggtcaggaagaagcggaaaaactgcgcgcgactgccgactatgaagtgaccagaacgctggcagaagctgagcgtcagggccgcatcatgcgtggtgaaggcgatgccgaagcagccaaactgtttgctgatgcattcagtaaagatccggacttctacgcattcatccgtagcctgcgtgcttatgagaacagcttctctggcaatcaggacgtgatggtcatgagcccggatagcgatttcttccgctacatgaagacgccgacttccgcaacgcgttaatataacgactgcggtacaggtcaataaagccaccgcatcctcagggatgtcggtggttttctttttctataaggataatgaatgaattcgacaatctggctggcgcttgccctggttttggtactggaaggtttagggccgatgctttacccgaaggcatggaagaagatgatctctgcgatgaccaatttgcccgataatattttacgtcgttttggcggtggacttgtggttgcgggcgttgtggtctactacatgttgaggaaaacgattggctgaacaaaaaacagactgatcgaggtcatttttgagtgcaaaaagtgctgtaactctgaaaaagcgatggtagaatccatttttaagcaaacggtgattttgaaaaatgggtaacaacgtcgtcgtactgggcacccaatggggtgacgaaggtaaaggtaagatcgtcgatcttctgactgaacgggctaaatatgttgtacgctaccagggcggtcacaacgcaggccatactctcgtaatcaacggtgaaaaaaccgttctccatcttattccatcaggtattctccgcgagaatgtaaccagcatcatcggtaacggtgttgtgctgtctccggccgcgctgatgaaagagatgaaagaactggaagaccgtggcatccccgttcgtgagcgtctgctgctgtctgaagcatgtccgctgatccttgattatcacgttgcgctggataacgcgcgtgagaaagcgcgtggcgcgaaagcgatcggcaccaccggtcgtggtatcgggcctgcttatgaagataaagtagcacgtcgcggtctgcgtgttggcgaccttttcgacaaagaaaccttcgctgaaaaactgaaagaagtgatggaatatcacaacttccagttggttaactactacaaagctgaagcggttgattaccagaaagttctggatgatacgatggctgttgccgacatcctgacttctatggtggttgacgtttctgacctgctcgaccaggcgcgtcagcgtggcgatttcgtcatgtttgaaggtgcgcagggtacgctgctggatatcgaccacggtacttatccgtacgtaacttcttccaacaccactgctggtggcgtggcgaccggttccggcctgggcccgcgttatgttgattacgttctgggtatcctcaaagcttactccactcgtgtaggtgcaggtccgttcccgaccgaactgtttgatgaaactggcgagttcctctgcaagcagggtaacgaattcggcgcaactacggggcgtcgtcgtcgtaccggctggctggacaccgttgccgttcgtcgtgcggtacagctgaactccctgtctggcttctgcctgactaaactggacgttctggatggcctgaaagaggttaaactctgcgtggcttaccgtatgccggatggtcgcgaagtgactaccactccgctggcagctgacgactggaaaggtgtagagccgatttacgaaaccatgccgggctggtctgaatccaccttcggcgtgaaagatcgtagcggcctgccgcaggcggcgctgaactatatcaagcgtattgaagagctgactggtgtgccgatcgatatcatctctaccggtccggatcgtactgaaaccatgattctgcgcgacccgttcgacgcgtaattctggtacgcctggcagatattttgcctgccgggcgaacagtgtgatacattgctgtgtcgggtaagccattacgctatccgacacagtgttaaatcctcgcttttttccttccccgaactgaaataaattagcgacacagcttgtggctggtttatcatcaatataaatgtattttttcccgatttcccttttgaggttgatgtgcagttaacgagtttcactgattacggattacgtgcgctgatctacatggcgtcattgccagaagggcggatgaccagtatttctgaagtgactgacgtctacggcgtctcccgtaatcatatggtcaaaataatcaatcaacttagtcgtgccggctacgtgactgctgttcgtggaaaaaatggcggcattcgcctgggtaaaccggcgagtgcgatacgtattggtgatgtggtgcgcgagctggagcccttatcgctggtgaattgcagcagtgagttttgccacattacacctgcctgtaggttgaaacaggcactttctaaggccgtgcaaagttttcttacggaactggataactacacgcttgccgatttggttgaagagaatcaaccgctttataaattattgctggtggagtgacgaaaatcttcatcagagatgacaacggaggaaccgagatgtcacaagatcctttccaggaacgcgaagctgaaaaatacgcgaatcccatccctagtcgggaatttatcctcgaacatttaaccaaacgtgaaaaaccggccagccgtgatgagctggcggtagaactgcacattgaaggcgaagagcagcttgaaggcctgcgtcgccgcctgcgcgcgatggagcgcgatggtcaactggtcttcactcgtcgtcagtgctatgcgctgccggaacgcctcgacctggtgaaaggtaccgttattggccaccgtgatggctacggctttctgcgggttgaagggcgtaaagatgatttgtatctctccagcgagcagatgaaaacctgcattcatggcgatcaggtgctggctcagccgctgggtgctgaccgtaaaggtcgtcgtgaagcgcgtattgtccgcgtactggtgccaaaaaccagccagattgttggtcgctactttaccgaagcgggcgtcggctttgtggttcctgacgacagccgtctgagcttcgatatcttaatcccgcccgatcagatcatgggcgcgcggatgggctttgtggtcgtagtcgaactgactcagcgtccgactcgccgcaccaaagcggtgggtaaaatcgtcgaagtgctgggcgacaatatgggcaccggcatggcggttgatatcgctctgcgtacccatgaaattccgtacatctggccgcaggctgttgagcaacaggttgccgggctgaaagaagaagtgccggaagaagcaaaagcgggccgtgttgatctgcgcgatttaccgctggtcaccattgatggcgaagacgcccgtgactttgacgatgcagtttactgcgagaaaaaacgcggcggcggctggcgtttatgggtcgcgattgccgacgtcagctactatgtgcgtccgtcaacgccgctggacagagaagcgcgtaaccgtggcacgtcggtgtacttcccttcgcaggttatcccgatgctgccggaagtgctctctaacggcctgtgttcgctcaacccgcaggtagaccgcctgtgtatggtgtgcgagatgacggtttcgtcgaaaggccgcctgacgggctacaaattctacgaagcggtgatgagctctcacgcgcgtctgacctacaccaaagtctggcatattctgcagggcgatcaggatctgcgcgagcagtacgccccgctggttaagcatctcgaagagttgcataacctctataaagtgctggataaagcccgtgaagaacgcggtgggatctcatttgagagcgaagaagcgaagttcattttcaacgctgaacgccgtattgaacgtatcgaacagacccagcgtaacgacgcgcacaaattaattgaagagtgcatgattctggcgaatatctcggcggcgcgtttcgttgagaaagcgaaagaaccggcactgttccgtattcacgacaagccgagcaccgaagcgattacctctttccgttcagtgctggcggagctggggctggaactgccgggcggtaacaagccggaaccgcgtgactacgcggagctgctggagtcggttgccgatcgtcctgatgcagaaatgctgcaaaccatgctgctgcgctcgatgaaacaggcgatttacgatccagaaaaccgtggtcactttggcctggcattgcagtcctatgcgcactttacttcgccgattcgtcgttatccagacctgacgctgcaccgcgccattaaatatctgctggcgaaagagcaggggcatcagggcaacaccactgaaaccggcggctaccattattcgatggaagagatgctgcaactgggtcagcactgttcgatggcggaacgtcgtgccgacgaagcaacgcgcgatgtggctgactggctgaagtgtgacttcatgctcgaccaggtaggtaacgtctttaaaggcgtaatttccagcgtcactggctttggcttcttcgtccgtctggacgacttgttcattgatggtctggtccatgtctcttcgctggacaatgactactatcgctttgaccaggtagggcaacgcctgatgggggaatccagcggccagacttatcgcctgggcgatcgcgtggaagttcgcgtcgaagcggttaatatggacgagcgcaaaatcgactttagcctgatctccagcgaacgcgcaccgcgcaacgtcggtaaaacggcgcgcgagaaagcgaaaaaaggcgatgcaggtaaaaaaggcggcaagcgtcgtcaggtcggtaaaaaggtaaactttgagccagacagcgccttccgcggtgagaaaaaaacgaagccgaaagcggcgaagaaagacgcgagaaaagcgaaaaagccatcggcgaaaacgcagaaaatagctgcagcgaccaaagcgaagcgtgcggcgaagaaaaaagtggcagagtgatcaataccctctttaaaagaagagggttagattgctgacaaaatgcgctttgttcatgccggatgcggcgtgaacgccttatccggcctacataatcacgcaaattcaatatattgcagagatcatgtaggccggataaacgtagtgcatcaggcaaaacgtaaacaacgagtacattaatgagcgaaatgatttacggcatccacgcagtgcaggccctgctggagcgcgcccctgaacgttttcaggaagtctttattttaaaaggccgtgaagataaacgtctgttaccgctgattcacgcccttgagtctcagggcgtggttatccagttggcaaaccgccaatatctcgacgagaaaagcgacggtgccgtgcatcagggcattatcgcccgcgtgaagccaggacgtcagtatcaggaaaacgatctgccggatctgatcgcttcgctcgatcaaccgttcctgctgatcctcgacggcgtaaccgatccgcacaacctcggcgcgtgcctgcgtagtgcggacgccgcaggcgttcatgcggtgattgtgccgaaagatcgctccgcacagctcaacgctacggcgaaaaaagtagcctgcggcgcggcagaaagcgttccgctgattcgggtgactaaccttgcgcgcaccatgcgtatgttgcaggaagagaatatctggatcgtcggtacggcaggcgaggcggatcatacactctatcagagcaaaatgaccggacgcctggcgctggtgatgggtgcggaaggtgaaggtatgcgtcgcctgactcgtgaacattgcgatgagttgatcagcatcccgatggctggaagcgtttcttccctgaacgtttcggttgcgaccggaatttgcttatttgaagcggtgcgccagcgcagctaatttctcagaattatgaaaagccatccagatttggatggtttttttttgtctatagctggtaagataattacgtattgcaaatattcattttattaatatttaaacttaatctatatggaataatatatgacatggaatccgttggcgctagcgacggcgctgcaaactgtacctgaacaaaatattgatgtaacaaatagcgagaacgcattaattattaaaatgaatgattatggcgatttgcaaatcaatattctttttacttcccgccaaatgattatcgaaacctttatttgtccggtgagtagtatcagcaatccagatgaatttaataccttcttattaagaaatcagaagatgatgccgttgtcatcggtagggatctccagcgtacaacaggaagagtattacattgttttcggggcgttatcgcttaaatcttctcttgaagatatcctgcttgagataacctcgctggtagataacgcattggatctggctgaaattacagaagaatattcacactaattacaaggacgggtatttatgggaattttaaaaagtttatttacgctggggaaatcgtttatctcccaggcggaagaatccattgaagaaacccagggcgtgcgcatgctggaacagcatattcgtgacgctaaagctgaactcgataaagccggaaaatctcgcgttgatctgctggcgcgggtgaaattaagtcacgataagctgaaagatttacgtgagcgcaaagccagtctggaagcccgtgcgctggaagcgttaagcaagaacgttaatccgtcgttgattaacgaagttgctgaagaaatcgcgcgccttgagaatctcattaccgctgaagagcaagtgttgtcgaatctggaagtctcccgtgatggcgtggaaaaagcagttacagcgacagcgcagcgtatcgctcagtttgagcagcaaatggaagtcgttaaagccactgaagccatgcagcgtgcacaacaggctgtaacaacctctaccgttggcgcatcttccagcgtttcgacagcggcagaatccttaaaacgcctgcaaacgcgtcaggccgaacgtcaggctcgcctggatgctgccgcacagttggagaaagtcgcagacggtcgcgaccttgacgaaaagctggcggaagccggaattggcggtagcaataaaagtagcgcccaggatgtattagcaagactgcaacgccaacagggcgagtaatttttttgccagcctcgctaaaaggctggcaactattttaaggataaaatatgtctggttttttccagcgtctgtttggcaaggataataagccagctatcgctcgtggtccgctgggacttcatctcaatagtggctttacgctcgacacgttagcgtttcgtttgctggaagatgaattgctgattgcgctgccgggtgaggaatttacggtagccgccgtcagccacatcgatctgggcggcggtagtcagattttccgctactacacttcaggcgatgagtttctgcaaatcaataccaccggcggcgaagatattgatgacattgatgatatcaagctctttgtctatgaagagagctacggtatcagtaaagagagtcactggcgcgaggcgatcaacgccaaagcgatgggagcaatgaccttaaactggcaggaaaaacgctggcagcgattttttaacagcgaagaaccgggaaatatcgaacccgtctacatgctggaaaaagtagaaaatcaaaaccatgccaaatgggaggtccataattttaccatgggctaccaacggcaagtaaccgaagatacttacgaatatttgctgctaaatggtgaggaatcttttaacgatctcggcgagccagagtggttattttcgcgcgcgttgggtgtcgatatcccgctgacatcacttcatattattggttaattacaaggacgtttacaatgcatatactggattcacttcttgcctttagcgcctatttttttattggcgtggctatggtgattatttttctgtttatctattctaaaattacaccgcacaacgaatggcagttaatcaaaaacaataataccgcggcgtcactggcgttcagcggtacattgttgggttacgttatccccttatccagtgcggcaatcaatgcggtgagtattccagactatttcgcctggggcgggattgcactggtgattcagttactcgtttttgctggtgtcagactttatatgcccgcattaagcgaaaaaattattaatcacaataccgcagcaggaatgtttatgggaaccgccgcgctggctggcggtatttttaacgcagcttgtatgacatggtaatggacgatcatggccagaaaacgcaaatcaagaaataacagtaaaattggtcacggagcgattagtcgcattggtagaccgaataatccttttgaaccgtgccgcaatcgctacgcacaaaaatacttaacgttggcgctaatgggcggtgccgcttttttcgtattgaaaggttgtagcgatagtagcgatgtcgataacgacggcgacggaacgttttacgcgacagtgcaggattgtattgatgacggtaataatgccgacatttgcgcgcgtggctggaacaacgccaaaacggcattttatgccgatgttccgaagaatatgactcagcagaactgtcagtctaagtacgaaaattgctactacgacaatgttgaacagagttggatcccggtcgtttctggatttttgttaagccgggttattcgtaaagatcgcgatgagccgtttgtttataacagcggcggttcctcttttgcttcgcgcccagtctggcgcagcacttctggtgattactcctggcgctccggttctggcaaaaaagagtcttactcttcgggcggctttaccaccaaaaaagcgtctaccgtttctcgcggcggctatggtcgttcttccagcgcccgtgggcattggggaggctaatcatgctgagacacaacgttcctgtgcgacgggatctggaccagatcgccgctgacaacggtttcgactttcatatcatcgacaatgaaatctattgggatgagagtcgggcttaccgttttactctgcgccagattgaagagcagatcgaaaaaccgactgcggaactgcatcagatgtgccttgaggtggtggatcgcgcggtaaaagatgaagagatcctgacgcaactggcgatcccgccgttgtactgggatgtgatcgctgaaagctggcgcgcccgcgatccttcgctgtatggacggatggattttgcctggtgtggcaatgcgccggtgaagctgctggagtacaacgccgatacgccaacttcattgtacgagtcggcttatttccagtggctgtggctggaggatgcccggcgcagcggcattattccgcgtgatgccgatcagtacaatgctattcaggaacgcctgatttcacgctttagcgagctttacagtcgggaaccgttttatttttgctgctgtcaggacaccgatgaagacaggagtaccgtgctgtacttgcaggactgcgcccagcaggcagggcaggagtcgcggtttatctacattgaagatctcggtttgggcgtcggcggcgtactgaccgatcttgatgataatgtcatccagcgtgcatttaagctgtatccgctggagtggatgatgcgtgacgataacggtccgctgctgcgcaagcgtcgcgagcaatgggtggagccgttatggaaaagtatcttgagtaataaagggctaatgccgctgctttggcgcttcttccctggtcatcctaatcttcttgcgtcctggttcgatggcgagaaaccgcagattgccgctggcgaaagctatgtgcgtaaaccaatctattcgcgcgaaggcggcaacgtcaccatttttgacggcaagaataacgttgttgaccacgctgatggtgattacgccgatgaaccgatgatctaccaggcgtttcaacctctgccgcggtttggcgatagctacacactcatcggtagctggattgtcgatgatgaagcgtgcggaatggggatccgtgaagataacacactgatcaccaaagacacctcacgtttcgttccgcattacattgctggataagaatgttttagcaatctctttctgtcatgaatccatggcagtgaccatactaatggtgactgccattgatggagggagacacagtgcactggcaaactcacaccgtttttaatcaacctataccattaaataacagcaacttatacctgtctgatggcgcgctctgcgaagcggtaacgcgtgaaggtgctggctgggatagcgattttctagccagtattggtcagcagttaggaacggctgaatcccttgaactggggcggctggcgaatgtgaatccgcctgaattattgcgctacgatgcgcaaggacgccgtctggacgatgtgcgttttcaccccgcctggcacctgctgatgcaggcgctatgtaccaatcgggtgcacaatcttgcctgggaagaagacgctcgctccggcgcatttgtggcgcgcgcggcgcgttttatgttacatgcgcaggttgaggcagggtcgttatgtccgataaccatgacctttgccgccacgccattgttgttacagatgttacccgcgccgtttcaggactggaccacgccgctattgagcgatcgctacgattctcacttattgccaggtgggcaaaaacgcggtttgttgattggcatgggaatgacggaaaagcagggcggttccgatgttatgagcaacaccacccgtgcagagcgtctggaagatggctcttatcggctggtggggcataaatggtttttctcggttccgcaaagcgatgcgcatctggtgctggcgcagaccgcgggtggtctgtcctgcttttttgtgccgcgctttttgcctgacgggcaacgcaacgcgattcgcctcgagcggctgaaagataagctgggtaatcgctctaacgccagttgcgaagtggagtttcaggatgccattggttggttgttggggctggaaggggaaggaattcgtctgatcctgaaaatgggtgggatgacgcgttttgattgcgccctgggtagccatgccatgatgcgccgtgcattttcgctggcgatttatcatgcacatcaacgccatgtttttggtaatccattgatccaacagccccttatgcgtcatgtcttaagtcgcatggcacttcagcttgaagggcaaacggcgttgctgtttcgtcttgcgcgagcgtgggaccggcgtgccgatgccaaagaagccctgtgggcgcgtttatttacgcctgcggcaaaatttgtgatctgcaaaagaggtatgccgtttgtggccgaagcgatggaggtgctgggcggcattggttattgcgaggagagtgagctgccgcggctttaccgggagatgccggtaaacagtatttgggaaggttccggcaatattatgtgcctggatgtgttgcgcgttctcaataagcaagcgggcgtatacgacttattgtcggaagcatttgtggaagtgaaagggcaggatcgctattttgatcgcgcggttcgtcgtttacagcagcagctgcgtaagccagctgaagaactggggcgagagattactcatcagctattcctgctgggctgcggtgcgcaaatgttgaaatatgcttctccgccaatggcgcaggcgtggtgtcaggtgatgttagatacgcgcggcggcgtacggttgtcagagcagatccagaatgatttattgctgcgggcgacggggggagtgtgtgtgtaagcgtatacgactgatgcgacgctggtttcgattaactaaatgaaatatgtgaaaattgtaggccggacaaggcgctcgcgccgcatccggcattgttcatttgctgtagatgacactcatgcatacagtatcgcctgtacgcgccagttatcaggctgctggtcttcgtacatggtaataatgcggtaccatgacgcaccttgttcatcggcctttaacgccacgatacgttccacgtcctgcggatcccctgaaatattgctaactgagatctgacctatttcattcaggcccgtcacgcagtcagcactggcgaattctgcagactgtgccgtggcgctcgcaggataagtcactaattgcagcgagggtgaggcaagtaattgtttcatcgtcagctccatttttcgtttccccacatgttgcagggcattccatcgcggtaataaacgcccaggcttccagccggtaatttattgtgcacaggtaaacgcatagggacgcaaagcaatgtaaagctgactatgtaagttgtctgatttatttacggtacaaaatggcttgtgaataccactgtcctgtcacgatggtttcgtccaccatgacgacaacgtaataatcagcttttgcagcgacagctttcgctttgatttctgctaatgcgtcatccggagaaccccgaaccatcgtgcttacgctacctattcgctgtaacccttgcgtctggtcgcggcgaatctcttgcggatggtccgttactggcggtgctggctgtggcgtaccttgcagtgcgctacaggcacttaacatcaacaccaataataaactggcaaaccggtaaataacgctattacgtttcctgctaaccatagtgtagtgccttattaatttaactttgggggaatgttcccgaattgttacctggtacgcgattttcgaatgaaaacgtgacgaaagcgtaacccacatctcaacattatgaactaataccgccagcagaaacttgtgctaaggatttcttcatgtcataccagacaaaaaggagagacagatgattgaaatagaatcacgcgagctggcagatattcccgttcttcatgcttatcctgtcgggcaaaaagataccccgttaccgtgcgtaattttttatcacggctttacttcatccagtctggtgtatagctattttgccgttgcgctggcgcaggctggtttgcgggtgatcatgccggatgcgcccgatcacggtagccgttttagtggtgacgcagcgcggcggttaaatcaattctggcaaatcttgctacaaagtatgcaggaattcactactttacgtgcggcaatagccgaagaaaactggctgcttgatgaccgtctggcagtcggtggcgcgtcgatgggcgcgatgacggcactggggattaccgctcgccaccccacggtgagatgtaccgccagcatgatgggatcgggctattttacatcactcgcccgttcactgtttccaccgctgatacctgaaacggcagcacagcagaatgaattcaataacattgtcgcgccactggcagagtgggaagcgacaaaccacctggaacaacttagtgacagacctctactgctgtggcatggcctcgacgatgacgttgtgcctgccgacgaatcactacgtttgcagcaggccttaagcgagacgggacgggataaactgctaacctgttcatggcagccaggcgtgcgtcaccgcattacgcctgaggcgttagatgctgccgtgacatttttccgccagcatctttaaacacgcagaatgctgaccccttgcgcttccagttgttgcaggatttccgggttagcatttttgccggtgataagcatatcgatttgatcggcacggctaaaaagcattcccgcgcgttcgccaatcttactgctatcaaccagtaccaccagtttccctaccacgctcagcatcttctgctctgccattgctgtcagcatatcggttttatacaacccttctgcggtcagcccttttccgctggtaaacatccagtgcccggcatagagactgttttcgctgccctgcgggcttaaagtgatggactgacttttgttgtactgtccgcccataatgatcacgctgtcatgttcttgatcgatcaggtaatttgccagcggtagataattagtgatgatttgcactggcttgccacacatttcccgcccaagcagaaacgcggtggagccgcagttgatgactacgctttcgcccggattaaccagctgcgaggccgctttagcgatacgtactttttcatcgtgattctgcgcctgatgcagattcatcggcgtccagcgcgggcgctgttgggtaatagcttctgcgccattgcgcacttttttcagtttgccgctttcgtcaagtttattgatatcgcgtcgcgcagtggcaggcgaaattcccagacgctcaacgactttctcaacggtcacaaagcccaattgtgcgagcatttccaggaggatttgatgtctttgtgcttcagtcatgagctattccgataaaatttgatttttttagatgatatttgaaatagccaggaaatactacgccggatagcgcgaacttctccacgctacccggtataaacgacagattacaggaatgacttgaacggcagatccggttcaatagtgaagcaatcatcgaaaccgcgcggatagtggtactcgaagttgtctttatccagcggccaggtaaatttgccacccacctgccagataaacggcttgaagccatacttcaggcgatcttttttcatctcccacagcacgcggatctcttgcggatcggcctggaagtttgaccagatatcgtggtggaacgggatcactactttcgcattcagcgcttcacccatacgcagcatatcggcgctggtcattttgtcggtgataccgcgcgggttttcgccgtacgatcctaacgccacgtcgatctgatgttcgttaccgtgcttcgcataatagttagagtagtgggagtcgccgctgtgatacagggagccgccaggcgttttgaacaggtagttcaccgcgcgatcgtccatgccatctggcagtacgccagccgctttttgatcggcaggcagggtgatcagtgcagtacggtcgaaagcatcaagcgcatgaatttcaatgtctttcacttttactacatcgcccggtttgaccacgatgcaacgctctttcggtacgccccagccaatccacaaatccacacaggttttcggtccgataaacggtacgtcatctgcacaattctgcatcacggcagcagcgacgttaacgtcgatatgatcgttgtgatcgtgagtcgccagtaccgcgtcgatctggcgaatcgcaaacggatcaagaacaaacggggtggtacgcaggtttggctgcagttttttcacgccagccatgcgctgcatctggtgaccctgtttcattaacgggttaccgtgactttgtttgccagtgccgcaccagaaatcaacgcaaacgttggtgccaccttccgatttcaaccagatcccggtgcagccaagccaccacatcgcaaatgtgccaggagcgacctgttcttgttcaatttcttcattcaaccagctaccccactccgggaaagtgctcaggatccaggattcacgggtgatacttttcactttactcatcgccatttaccttcatgatagttcaattcgaatcaatatgtgattggttttgattaatcctgacactattttttcaggaaggcaatgaccattttttgactttttgccagggaagttgttgttgattttgagtatggaaagatttaatggaatgtgtaattcaattaactaaatgaatttaaatggataattgtttcgttgtgtgaatcccactctatccatgtggaattatttgcgggtcgcgtcacatttaatcataaataatcttgttgtgattacttttgaaaattagagtgagtgcacaacattccgggtgtgtggaatacccggttacctcttcttcaggagatcgttatggagatcctctacaacatctttaccgtgttttttaaccaggtcatgaccaatgccccgttgttgctgggtattgtgacctgtctgggctacatcctactgcgcaaaagtgtcagcgttattattaaaggcacgattaaaaccataattggtttcatgttgttgcaggcagggtccggcatcctcaccagcaccttcaaaccggtggtggcgaaaatgtccgaagtctacggcattaacggcgcaatttccgatacctacgcttcaatgatggcaaccatcgaccgcatgggcgatgcctatagctgggtgggttacgccgtattgttagcgctggcgctgaacatctgttacgtgctgttgcgtcgcattaccggcattcgcacaatcatgttgaccggccacatcatgttccagcaggccgggttgattgccgttacgctgtttatcttcggctactccatgtggaccaccattatctgtaccgcgattctggtttcgctctactggggcatcacttccaacatgatgtacaagccgactcaggaagtgacggatggctgtggtttctccatcggtcaccagcagcagtttgcatcatggattgcctataaagtcgcgccgttcctcggcaaaaaagaggagagcgttgaagacctcaaattgccgggctggctgaacattttccacgacaacatcgtctccacggcgattgtgatgaccatcttctttggtgccattctgctctccttcggtatcgacaccgtgcaggcgatggcaggcaaagtgcactggacggtgtacatcctgcaaactggtttctcctttgcggtggcgatcttcatcatcacgcagggtgtgcgcatgtttgtggcggaactctctgaagcatttaacggcatttcccagcgcctgatcccaggtgcggttctggcgattgactgtgcagctatctatagcttcgcgccgaacgccgtggtctggggctttatgtggggcaccatcggtcagctgattgcggttggcatcctggtcgcctgcggctcctcgatcctgattattcctggctttatcccgatgttcttctctaacgccaccatcggcgtgttcgctaaccacttcggcggctggcgtgcggcgctgaagatttgtctggtgatggggatgatcgaaatctttggttgcgtctgggcggtgaaactcaccggtatgagtgcctggatgggcatggcggactggtcgattctggcaccgccgatgatgcaaggcttcttctccatcggtatcgcctttatggccgtcatcattgtaattgcactggcttatatgttcttcgctggccgcgcgctgcgcgcagaagaagatgcagaaaaacaactggcagaacagtctgcttaataaggagttttgattatgaccgtacgtattctggctgtgtgtggcaacggacaaggcagttccatgatcatgaagatgaaagtggaccagtttttaacccaatcaaacattgaccatacggtaaacagctgcgcggttggcgagtacaaaagcgagttgagtggcgcggatatcatcatcgcttctacgcacattgcgggcgaaatcaccgtgaccggcaacaaatacgtggttggcgtgcgcaacatgctctctcctgccgactttggcccgaaactgctggaagtgatcaaagagcatttcccgcaggatgtgaagtaaggacgcgccatgaaattacgtgattcgctggcggaaaataaatccatccgcctgcaggctgaagcagagacatggcaggaagcggtgaaaatcggcgttgacctgctggtggcggcagatgtggtagagccgcgttactaccaggcgattctggatggcgttgaacagttcggtccttatttcgttatcgctccgggcctggcaatgccgcacgggcgtccggaagagggcgttaagaaaaccggtttctctctggtaacgctgaaaaagccgctggagttcaaccacgatgacaacgatccggtggatatcctcatcaccatggcggcggtcgatgccaatactcaccaggaagtgggcatcatgcagatcgtcaacctgtttgaagatgaagagaattttgaccgtttacgcgcctgccgtaccgagcaggaagtactggatctcattgaccgcaccaacgcggcagcttaagaaggaattgaacatgtcattaccgatgttgcaagtcgcgctggacaaccagactatggatagcgcctacgaaaccactcgcctgattgccgaagaagtcgacattatcgaagtgggcaccattctgtgcgtgggcgaaggcgtgcgtgcggttcgtgacctgaaagcgctctacccgcacaaaatcgtactggcagacgccaaaattgccgatgcaggcaaaatcctttcgcgtatgtgcttcgaagccaacgctgactgggtgacggtaatttgctgtgcggatatcaacaccgccaaaggcgcgctggacgtggcaaaagagtttaacggcgacgtgcagatcgaactgaccggttactggacctgggaacaggcgcaacagtggcgcgatgcaggcattgggcaggtggtttatcaccgcagccgtgacgcgcaggccgcaggcgtggcgtggggcgaagcggacatcaccgcgatcaaacgtctttccgatatgggcttcaaagtcaccgtcaccggaggcctggcgctggaagatctgccgctgttcaagggtattccgattcacgtctttatcgcgggccgtagtatccgtgatgccgcttctccggtggaagccgcacgtcagttcaaacgttccatcgctgaactgtggggctaaggagcggatatgttgtccaaacaaatcccgcttggcatctatgaaaaagcgctccccgccggggagtgctggctggaacgcctgcaactggcaaaaacgttaggcttcgattttgtcgaaatgtcggtagatgaaactgacgatcgcctgtcgcgcctcaactggagccgcgagcagcgtctggcgctggtcaatgcgattgttgaaaccggcgtgcgcgtgccgtccatgtgcctttctgctcatcgtcgtttcccgctgggcagtgaagatgacgcggtgcgggcgcaggggctggagattatgcgtaaagctatccagttcgcccaggatgtcggtattcgcgtgatccagctggcgggctatgacgtttactatcaggaagccaataacgaaacgcgtcgtcgtttccgtgacggcctgaaagagagcgttgagatggcaagccgcgcgcaggtgacgctggcgatggagatcatggattatccgttgatgagctccatcagcaaggcgctgggatacgcgcactatctcaacaatccgtggttccagctctacccggatatcggcaacctgtcggcgtgggacaacgatgtgcagatggagttgcaggccggaatcgggcatatcgtcgcggtacatgtgaaagacaccaaacctggcgtcttcaaaaacgtgccgtttggcgaaggtgtagtggatttcgaacgttgtttcgaaacgctcaaacagagtggctattgcgggccgtacctgattgagatgtggagcgaaacggcggaagacccggcggcagaagtggcgaaagcgcgtgattgggtgaaagcgcgcatggcgaaagcgggcatggtggaggcggcataatgcaaaagctaaaacagcaggtatttgaagccaacatggagctgccgcgctacgggctggtgacctttacctggggcaacgtcagcgctatcgaccgcgaacgcgggctggtggtgatcaagcccagcggcgttgcctacgaaaccatgaaagcggccgatatggtggtggttgatatgagcggcaaggtggtggaaggggagtatcgcccatcttccgacactgcgacgcatctcgaactctaccgtcgttacccgtcgcttggtggcattgtccatacccactccactcatgccaccgcatgggcgcaggcggggctggcgatcccggcgttaggcaccacgcacgccgactacttctttggcgacattccgtgtacgcgcgggttaagcgaagaagaggtgcagggcgagtatgaactgaacaccggcaaagtgattatcgaaacgctgggcaacgccgagccgctgcatacgccgggaattgtggtgtatcagcacgggccgttcgcctgggggaaagatgctcacgatgcggtgcataacgcggtggtgatggaagaagtggcgaaaatggcgtggattgcccgcggcattaacccacaactcaatcacatcgacagcttcctgatgaataaacacttcatgcgtaaacacggtcctaacgcttattacgggcagaagtagaacacgcgctgcggaaatttccttcctcgggagataactggtctaattccgcagccgtttttcaaaaaaaagccccctgcgaagggggcaaagcaaactatggcaatgtttcgttggttatacctggtgctagcgataaatatccgcgctggcgtgcatattgccgttactccccggttcccgcatcagaattacgtggtagtacgttgcgccttgcgcatctgtttcttcatttaatgcctgacgtgcttcgctttcagtggcgaaattatgattgatataaatcacgcctaagctttgcacatcgtccatatttctggcctggtggttattaatttcaatggctgcccatgtatttgcacttagcaaaagcacagccagaagggctaaaacacgactgaacatagatacctcctcgacggctgactttgtgtgctctcctctgtgatgatcttctgatttaattttaatcaatgataaagaagttgatggtgaccatttctgatgcagttgttcaaaaaaacaccatgatgaagtgtgatgaacttcaaatcagcgtgttagaggttaattgcgaaaggggagatttatttcggctctgcccttgagtttagcgaggcatacaagtactataacgcgtcatttttcagccgacctttaacacgttccttgcctccccgggattcggctgacccagacaggaggctgaataatccgtaaggagcaattcgatgcgtcattacgaaatcgtttttatggtccatcctgaccagagcgaacaggttccgggcatgatcgagcgctacactgctgccatcactggtgcagaaggcaagatccaccgtctggaagactggggccgccgtcagctggcttacccgatcaacaaactgcacaaagcacactacgttctgatgaatgttgaagctccgcaggaagtgatcgatgagctggaaactaccttccgcttcaacgatgccgttatccgcagcatggttatgcgtaccaagcacgctgttaccgaagcatctccgatggttaaagcgaaagacgagcgccgtgagcgtcgcgatgatttcgcaaacgaaaccgctgatgatgctgaagctggggattctgaagagtaatttctgatgaccaaccgtctggtgttgtccggcaccgtgtgcagggctccccttcgaaaggtcagtccatcaggaattcctcactgccagttcgtgcttgagcatcgttctgtgcaggaggaagccggctttcaccggcaggcgtggtgtcaaatgcccgttattgttagcggacacgaaaaccaggccattactcacagtataacggtcggcagtcgcataaccgttcaggggttcatttcatgccacaaggcaaagaacggactgagcaaaatggttttgcatgccgagcagattgaattgatagattctggagactagccatatggcacgttatttccgtcgtcgcaagttctgccgtttcaccgcggaaggcgttcaagagatcgactataaagatatcgctacgctgaaaaactacatcaccgaaagcggtaagattgtcccaagccgtatcaccggtacccgtgcaaaataccagcgtcagctggctcgcgctatcaaacgcgctcgctacctgtccctgctgccgtacactgatcgccatcagtaatcggtcacggtccattaatacgactttgagaggataaggtaatgcaagttattctgcttgataaagtagcaaacctgggtagcctgggtgatcaggtaaacgttaaagcgggctatgctcgtaacttcctggtaccgcagggtaaagctgttccagctaccaagaaaaacattgaattcttcgaagctcgtcgcgctgaactggaagctaaactggctgaagttctggcagctgctaatgctcgcgctgagaaaatcaatgcactggaaactgttaccatcgcgtctaaagctggcgacgaaggtaaactgttcggttccatcggtactcgcgacatcgctgacgctgtaactgcagctggcgttgaagtggctaagagcgaagttcgtctgccgaacggcgttctgcgtaccactggcgaacacgaagtgagcttccaggttcacagcgaagtattcgcgaaagtgatcgtaaacgtagtagctgaataattcgttattcaacgagacgtaaaaacgccgaccattggtcggcgttttgctttctatttttcgtcaggtattagtttcgcaagtagatccattcaccattctcttgtgtccataagtcaggatggtttgctggcgttagatacatacgagcgcaactgatgtctcgctcctgcggcactcgctcgaaacccaaacccgagtagattgcggctgaacttgataaggaacgcagaccaattttcaaatcatggggtaaatcagaatacgcgtttagcaatgcagcaatgatgaatccgagggcattagaaacgcctgtaacagtgcgaagttggtcgatataaagatcgattgttggtagttcagatgaccagcaattaggcatttgggcaggaagggttacaacgtatcctatcgtttggccggtatagtctggagtaccataaccaggtcccaaaaccacttcgtgtattgtgtatttactgttgggttcgaaggattcgacatcttgcaataaatatttcagttctgcggttaacctcgcacccgcgtaagctttattgtatttctgggcgtgaatattatctaatgtagcttcatggttccatccaaaagaattatcaccattcattgtgattccatcgtaagcattacacctcgtcgctaacttattgaatgcttgccagtctgagagatctagtttgtggatctcaacagtacgtctgccatcgcaattatgatctcttccacgatttgaaagtaatgtagcgcgtgcgtattgatgaaattttaattttactggtttgtcggtggacgaaaaacgagataaatatgcaggaaatgaataaatagtcgttggtaatgtcattgtaatgttacctgtttaatgtttttataaatatcgcagctgaatgttcacagaaaaaaatcgatattaataaaaataagtttgttttctgaagtggtgaaaatagcggatggtgaaagatattaatatcaaaaatcgctcattatggatataacgatgcacccggggagaaaatgacttccacgccttacaccgtacattcttgttgtgcggtatgtaattattctacgctgtcggtatcggtgtattcgttaatcagcaggttagccagccacaaaaagccattgagaaaattattgattttacatgggattattatattgctaatccttggtttttaaaaattgtgcatagtgaaaatcaaagtaaaggtgtgcattatgcaaaatcacagcgtctcttagaaattaaccatgcgcacttgcagttaatggaatccttattggatgaagggaagaaacacaatatttttaagccagatatcgacccattgcaggtgaatattaatattgctgcgcttggcggatattatttgatcaaccagcatacgcttggcctggtttatcacatcagtatggtttcaccccaggcactggaagccagacgtaaggtcatcaaagagacaatccttagctggcttttggttgacccttcatctaccgcgcacgaataaaactgccatccggctggcgggtgaacaggacctgttgattattccccgtatcaatggttaagcccgtcaccacgccgctggcgttctggcggattttcaccatctgcccgttttgcaaattactcagcggcttacccgcgccttctacctgcgccattgcatagacatcggtagcgggcagtccgtggtcgcggaacagctgcgccatcgttttaccgggttcgacacggtaagagcgccattgattatcaattccgctatctggctggaatggttgcgtttgggtagtttgcggctgctcttctggctggccttcctgtataggttctggagcgaccggagccacctgatcaggatcattttgtggggtaactaattgcgcccgcagctgttcttctgtcggcggttgtgattgcgactgaatatctaactgcgcttcacgcgtcaccaccggcgcgttgggcgtatcatcagatggaagcagaaatccgaccaccaatacaatggcggcaataatgatcccccgacgatgcatcggcggcagcgggtccatgaagcgaaaattgtccggcgcgtgccagactttctccagggttggttttagttcaaagcgcccgggcatggtttcctcctgctccgcgtcttgttcctcaatcatagcctatgaataagctaacgctatgatgtccgtggtaaacccgcctttattatattcatacgggatattgctattgtttctttttccctgggatttgtcatcattcccgcgacaaagttttacccaaagaagtgtggctgatatgctgcccgctactttataccctaagaaaggaaatacgatgaccaccccaacttttgacaccatcgaagcgcaagcaagctacggcattggtttgcaggtagggcaacaactgagtgaatctggcctggaagggctgctgccagaagcactggttgcaggtattgccgatgcgctggaaggcaaacatccggctgttccggttgatgtggtgcatcgcgcgctgcgtgaaatccacgagcgcgccgatgccgttcgtcgtcagcgtttccaggcgatggctgctgaaggtgtgaaatacctggaagaaaacgccaaaaaagaaggtgtgaatagcaccgaatctggcctgcaattccgcgtgatcaaccagggtgaaggcgcaattccggcacgtaccgaccgcgttcgtgttcattacaccggtaaactgatcgacggcaccgtgtttgacagctccgttgctcgtggtgaacccgctgaattcccggttaatggcgtgatccctggctggattgaagcactgactctgatgccggtaggttctaaatgggaactgactatcccgcaggaactggcatatggcgagcgcggcgcaggcgcatccatccctccgttcagcaccctggtgtttgaagtcgaactgctggaaatcctctaagcagcgcattctgttcccctcgaacgagaggggagcaggcattcagcaataaacccttcagtttgccaaacggcgctattttgtgttgcaaagaccccgtaagcgtgtatttttgtgagctgtttcgcgttatcaccgtgatatgacactcactttaaacataaaattaacattagatctaaatcttagtattcatcccgcgtattgttacctaatatcgatgagtcccgatacagattcgtcgtatcatagactgactaaaggccgtagagcctgaacaacacagacaggtacaggaagaaaaaaacatggtagatcaggtaaaagtcgttgccgatgatcaggctccggctgaacagtcgctacggcgcaatctcacaaaccgacatattcagcttattgccattggcggtgccattggtacggggttgtttatggggtctggcaaaacgattagccttgccgggccgtcgatcattttcgtttatatgatcattggttttatgctctttttcgtgatgcgggcaatgggggaattgctgctttcgaatctggaatacaaatcttttagtgacttcgcttccgatttactcgggccgtgggcaggatatttcaccggctggacttactggttctgctgggttgtaaccggtatggcagacgtggtggcgatcacggcttatgctcagttctggttccccgatctctccgactgggtcgcctcgctggcggtgatagtgctgctgctgacgctcaatctcgccaccgtgaaaatgttcggtgagatggagttctggtttgcgatgatcaaaatcgtcgccattgtgtcgctgattgtcgtcggcctggtcatggtggcgatgcactttcagtcaccgactggtgtggaagcgtcattcgcgcatttgtggaatgacggcggctggttcccgaaaggtttaagtggcttctttgccggattccagatagcggttttcgctttcgtggggattgagctggtaggtacaacagctgcggaaaccaaagatccagagaaatcactgccacgcgcgattaactccattccgatccgtatcattatgttctacgtcttcgcgctgattgtgattatgtccgtgacgccgtggagttcggtagtcccggagaaaagcccgtttgttgaactgttcgtgttggtagggctgcctgctgccgcaagcgtgatcaactttgtggtgctgacctctgcggcgtcttccgctaacagcggcgtcttctctaccagccgtatgctgtttggtctggcgcaggaaggtgtggcaccgaaagcgttcgctaaactttctaagcgcgcagtacccgcgaaagggctgacgttctcgtgtatctgtctgctcggcggcgtggtgatgttgtatgtgaatcctagtgtgattggcgcgttcacgatgattacaaccgtttccgcgattctgtttatgttcgtctggacgattatcctttgctcgtaccttgtgtatcgcaaacagcgtcctcatctacatgagaagtcgatctacaagatgccgctcggcaagctgatgtgctgggtatgtatggcgttctttgtgttcgtggtcgtgttgctgacactggaagatgacactcgccaggcgctgctggttaccccgctgtggtttatcgcgctggggttgggctggctgtttattggtaagaagcgggctgctgaactgcggaaataaccgcattatcatgctggatggcgcaatgccatccagcttttagatcactcacccgccagcgcgcgtgggaacagtacattgttttccagactgatgtgatccatcaggtcatcaatcagttcattaatgccgttatacatcgctttccaggtggtgcaggcttctggcggcggtgtgacgttattggtggtgtgtttaatcacttccagcagttcgcccgcttcatcgtgctcgctttccattacgctgattggccccattgcctggctgcccatgccttgtttgatcatcgggaagaggatctgctcttctttcatcatgtggctggaaagctcttcatgcagcatggtcaggtattttgtcagcccttttggcacgctcggtttgtcggcgtgaacgcgctcgactttagtcgcttgcagaatcagctccggcagttgctcgcggtgacgatcgtggtagcgcacgatgatatggtcgatgatttctgccagcggggcgctacgccagtctttctcaatcggttgttcagcgagctttgccagttcagcttcaatgacctcaacatccagttctttacgtgccgccgcgcgcgccagcgtctgcttaccgccacagcagtaatccatatcatatttacgaaacagagctgaagcgcgaggaatagagagcgccagttcacctaaaggttggtcgcgataagccatagctgatacctcattcttaataagataagatgtattttaaatgcatctttaaggcaaaagctataacccttacgtagcagaggcttatttaactcactgccagcgtgtcaactttctgagacagattcagttaaaggtttttctggttttgctctgaccgcgatgaccacgccaatcactaacagcgcgataccgctcagcgtcattagcggcggcatttgctggcggagtaaaaaggtgtacagcaaacctgccagcgtttcgaaaacaatcagcggcccgagaatcactgtcggtaatagctggctggcgacgttccagcagagtgcgccaacccatgagcaaagcacggctatcgcaaccatcagactaataaacaccagcggacgggggccaaagggtagggagaagtccggcgtttgcgtattcagccagtaacaagcgacgagatagccgataagtgaaaccggcagtgtgaccagcgcctgcgctgttgcccacatcatcggatgtttgtcgggattttcccgcagccagcgggcgttgcgcagggcataccacgcccagcagaccacggaaactaacgccagcacgatgccagaggtataacgtgcccagtcaaaatcggggagtccgtggtttaactcagcaatattcacacacgccaggccgatgccaatacaaatcagtgctggggcgagttttccccacgcgagtttgccgtcgcgctggctataaagcagattggcaaagacaggaatgaccaccggcagggtgccgataatcatcgtggaaacaggcgcgccagtacgttgaatggcactggcaaggcagaagtaatagatgaggttgcccatcatagtgagcatcaaggcggtaagccagtcgcgacgcgccaactgacgcagacgcacgcgtcccagccaggcaatgggcagcgcaattaaccctaacgccagataacgccccatcgactgcaacatcgccgggtattccggcacgatcaacggcccgacaaaaataagcccccacatcaaccctgctaacagggcgtacagcacgccgctaatcattactggcatccattgatctgtcagaagaaagttcaggaagcagacatgattgctcccggcatcccgtcattatcagagaggatgcgggaggatgccactttaattaactagttattaacattaaaaagatggcttacgctttcggctaacgttgtcgttgggtggccaatcaatttgctaagtgttttgctgtcatcaaacagaccgcctttcgatgcgccaacgtcagaatccgccagcatatccgccagtccgtcgggcagtccgacgcttttcagtgccgcggcgaaatcggcttcgctcagattttgataggtaacctgtttgccgctctgtttggtcagctctgccgctaactgtgtcaacgtccaggcactatcgcccgccagttcgtaaaccttgccttcgtgaccggcttcgctaatcacgcgtgccgcagctgccgcataatctgcccgcgttgctgaggcgattttgccatcgcccgccgcaccgataaatacgccgtgttccagtgctgccggggcgctggcgaggtagttttcgctgtaccagccgttgcgcagcagggtgtaaacgatgccagaatcagccagcattttctccgtctcgatgtgctcatcggcgaggccgagcggggaggtatctgcatgtagcaggctggtataagcgataaatttcacgccagccgcctttgcggcattaataacattacgatgctgcggggcacgttgacccacttcgctggaagagatcagcagtagtttttccactccctgaagtgcagatgtcagtgcggcttcatcgccgtagtcagcctgacgcacggtaatgccttgtgctgccagggcttgggcttttgccggattacgaacgatagccactatttggctggcaggaaccgttttcatcaaggattcaataacatagtgaccaagttggccagtggcaccagtaatagcgatcatgggaagtctccatcgttttgtcttgtgtttaaatacgctaacacctaaacttacttttagtaagtacgtacaaaaaggtaagtatgaaatgagtcaggttagcctgtcgcaacaactgaaagagggtaatctctttgcggaacagtgcccgtcgcgcgaggtgttgaaacacgtcaccagccgttggggggtgttgattctggtggcgctacgcgaaggtactcatcgctttagcgacctgcggcgcaaaatcggtggggtgagtgaaaagatgcttgcgcagtcgttacaggcgttagaacaggatggttttcttaaccgtatcgcgtatccggtggtgccgccgcatgtggaatatagcctcacgccgctgggcgagcaggtgagcgaaaaggttgctgcactggcggactggattgagttgaatttgcccgaggtgttggcggtgcgggatgaacgtgcggcataactgccggatgcgctgagcttatctggtctacggtgcatggcttgtagggcggataagatgcgccagcatcgcatccgccaataaatgccggatgcggttgatgatttataggccgaaaaagaagtgttttacttactcaaatccacctgataaatcgcaaacccgatatcatcggtcgcgactttattcatcggatactgccctttctctttaataaacgctgcggctttatctgacggagaggtttcgaaacggatatccagtttcttatcgccagctatcggtgctaaacgccagttgttatctgccgccgggtgaatttcccccgcacgtttcgactcatcagcaatccacgctgccagcaccgagcggttctcatccggtgaagcaaaagcgatatggctgtcgcccgtaccggcaaatttgccgccgtaagcgcgatagttattggtggcaaccaggaacatggcgttcggatcaatcggcttgccattaaaggtcaggttcttaatcctttccgcattggcattaatcatctggcactcgccgtcataacgggcgggctgggtaacatcaatctgataattcacaccatcaataacatcaaagttataagtgcggaaaccatcccagttgatgagtgactgtggtttcgtgctgttgggatcaatctggttaaactgtcccgcggagcactccagccactctttcacctctttaccgctggctttcaccacaatcagcgtattgggatagagataaagatcggcggcattacggaaggtcaactggcctttttccacctccacatagcttgccgggtcatttttgcgaccaccgactttaaacggtgcggcagctgaaagcaccggcagttttgccagatccggatcgccctgaatgtaatgctcgacatacgctttttgcgcgttgttcaccacctgcacggtcggatcgtcctgcaccagcgccagatagctatacatattgtcggcagatttaccgattggcttgctgacgaactggcgtgtggcatcgtgatcggctttgagtgtttctaccagcttgctgtcttccgccgcgagggattttttattagcgatgtcgtaaatcggtcgtgcttccgctttcgcctgcgtcacctgccatttaccgctgtcattactgagttgtaagtcgaccacaccaagatgatcgccccacatgcctggcattaccgccggaacaccattcagcgtgcctttggcgatatcagccccttcgatatcagcaaaatctttacctgggaaaacggcgtgagcatggccaaacataatggcgttaacgcccggaatttcactgaggtaataaactgagttttccgccatcactttatacggatcggcagatagcccggaatgtgccagaacgacaacaacatcggcacctttctcgcgcatttcaggcacgtatttgcgcacggtttcggtaatatcattcaccgtcactttcccggataaattagctttatcccagcccatgatttgtggtggcacgacgccaatatagccaatcttcagcgtctgtttttttccgtctttatcgaccacttcggtgtctttaattaaatacggtgtaaacattggctgtttggttctggcgtcaatgacgttggcatttacataagggaatttcgctcctgccagcgcatttttcaggtaatccagaccgtagttaaactcgtggttgccaagcgttccgacggtatagtccagcgtatttaatgccttatagaccgggtgaatatcacctgcttttaatcctttcgccgacatgtaatcggccagcggactcccctgaatcaaatcgccgttatcaaccagtacgctgtttttcacttcattgcgggcatcgttaatcaggcttgccgtacgtaccagtccgaatttttccgtggcggtgtctttgtaataatcgaaatccatcatgttgctatgcagatcagtggtttccatgatacgcagatcgaccgtcgctgcattcacactggcggcaatcagcgtggccaggagcgttgcgctaaacttaatcatcagggacatccttttatcatcgggaatacgaaagaaaagggagaataaacgtcttacttatagaacagtgaagaatgccacaattttacgctttgaaaatgatgacactatcacagttggcgcattcattaacgatagggtataagtaaaacaataagttaacaccgctcacagagacgaggtggagaaatgttagatcaagtatgccagcttgcacggaatgcaggcgatgccattatgcaggtctacgacgggacgaaaccgatggacgtcgtcagcaaagcggacaattctccggtaacggcagcggatattgccgctcacaccgttatcatggacggtttacgtacgctgacaccggatgttccggtcctttctgaagaagatcctcccggttgggaagtccgtcagcactggcagcgttactggctggtagacccgctggatggtactaaagagtttattaaacgtaatggcgaattcaccgttaacattgcgctcattgaccatggcaaaccgattttaggcgtggtgtatgcgccggtaatgaacgtaatgtacagcgcggcagaaggcaaagcgtggaaagaagagtgcggtgtgcgcaagcagattcaggtccgcgatgcgcgcccgccgctggtggtgatcagccgttcccatgcggatgcggagctgaaagagtatctgcaacagcttggcgaacatcagaccacgtccatcggctcttcgctgaaattctgcctggtggcggaaggacaggcgcagctgtacccgcgcttcggaccaacgaatatttgggacaccgccgctggacatgctgtagctgcagctgccggagcgcacgttcacgactggcagggtaaaccgctggattacactccgcgtgagtcgttcctgaatccggggttcagagtgtctatttactaaattcagatggcagaaacagtgtatttcctgattctgccatcctgatttctcccaacctaaaaagttataaataaaaagagattgtatttaaagtgcaaaaattcaattgctaataagttacattttaataatgagcgttttttgatagtttacttctatagtgagatatttaatggcgacataaagtaaccaaataaaataaggttgtcatatgttacccaggatcagacacaataattttattggtgcggtggagttatttgtaaagtcttcgtatacaaaaacacattcaaacaatttttttaacaacatccatcatgcatttaagaaaaaagattggatttcgaattatgatagcctgttaactttgagggagttctttcgttgcgcaactcagattgataaaagtggttatcaggtgctttcatcaaaaaatgaaactgttcacgccatggataagtttcttatcagtttcagccttaaagataacggtgccgaatatacaatgacattgcgaggtagtggatttgaatacgaagaaatacccataacaataaatgaatataactcattcatggatttcaaaaaccgtgaatttccgttagaacaaacagacgattgtatgcctgggatattctacagaaaaaacagtctgacataccgaaaaggattaaaggttatattcaccaggcgattggtgacgtgtctttaggttatgccttattggaggatatagtaagcaaattaaaacggggtaaatttgaactccaaataccaggaggtggaattaaagaatgcgatggatggtatatttacgaaaaaataattgatgataattttgccatagtcatagaatctttgggctttgcgcttaaaatctatggaggggatgaacgttttcgtaatggttcctctgttgttttggaggatgaagattactctcttatttataattttctggttaatgcaggttgccaacaagtcgaattagccgaacaagtggatgcgatagtaagtgcgaatctggccgcagatagcgatattaccaaagaaaagatttgcgagaaatataaatcgaccattgaggcgtttaaaaaagagcaactagcgttaccagtattagttcggcgtaagaactcagagacttaattcccctatcccatagataacgataggggaaaattatttttgcagaatttatgttattgccattatttgagcaacttttgcagcaggtccatcacttgctgcacctcttccggtgtgagcgccccgtctttggcccattgcacgcgaccatccttatccagcaccactacagcggaactttcttcatccagctgccaggcaccgagcgcgacgccattgctatcgacaataaactgcgaccagggataaagctttttattactctccagactgctgcgcacaaacatccctgaacccggaatcgcgtcgtcggtgttaacaatggtggtggtctggtaacgatcgtgcggtaacttcgctgatttaatcgcttcaatcagcgtcgcgtttttctcttttgcagaggtgcgaccagcaatatgttgcagtactcgcacttttcccactaactgcgcgctgttccaggttttgtagctaaactgatctttatcaagcaccaactcgccccgatcggtaatgccaatcggcggcactcgctgaccggtttcgaactgatgtgcggaagccatcatcggcaacagcaggcaggtgagtgccagaatcttgcgtagggtcatggtgtttccttcttatgatatgcaggtgatccgaccacttgggtctgagttttaatcatatgtgctatttatcgaatttcccgcaagtgtgatgccagtttgcggtcaagcgcacaaatcatatgaaaaatgaatgcttatactgaagaccgcgcttcggtaaaaagataattctgaataattgtaacctttaggtaaaaaaagttatacgcggtggaaacattgcccggatagtctatagtcactaagcattaaaatttgcgcctcataatagttgggccgattgtggcaccgcacaggcgtaatactcagcaggagataacaatgaaaattttccaacggtacaacccacttcaggtggcgaagtacgtaaagatcctgttccgtggacggttatacatcaaggacgttggcgcttttgaattcgataagggtaagattcttatcccaaaagtgaaggataagctgcatttgtcagtgatgtccgaagttaaccgtcaggttatgcgtctgcaaacagagatggcttaaccaaagtgctatgcagtaaaaagtgctatgcagtaataagacggctcctgattcaggagccgttgatgtttctgggggttacgcgacgctttcttctttatctttagcgtcaggcagttttggcgaaagggcggtggccttgctgtcgatccgggtcaccagcagctggtcgatgcggtagttatcgatatccaccacttcaaatttgtagccggcgaatttcaccgaatcggtgcgtttcgggatcttacgcagcataaacatcataaagccgccgatggtttcgtagttgcccgactgcgggaactcgtcaatatccagcacgcgcatgacgtcgtcaattggggtgccgccgtcaatcagccatgagttctcatcacgggcgacaatctgctcttccagcccctgaccgaccagatcgcccatcagcgtggtcatcacgtcattgagggtgatgatccccaccaccagcgcgtactcgttcatgatcaccgcgaagtcttcacctgcggttttaaaactttccaacgcctctgaaagggttaacgtatccggcacaatcagcgtgttgcgaatttgtacgccgctgttcagtgccaggctttggttagccagcacgcggttcagcaggtctttagaatcgacataaccgatgatgtggtcaatatcttcattacagacgaggaacttagagtgcggatgttccgccaccttattcttcaggctttgctcatcttcgtggagatcaaaccaaatcacgttttcacgcggtgtcattgaagacggaacggtacgggattccagctcaaagacgttttcaatcagctcgtgttcctgtttacgtaacacgcccgccagcgcaccggcttccactaccgcgtagatgtcatcagaagtgatgtcatctttacgtaccattggcagtttgaaaatacggaagattatgttcgccaggccgttgaagaaccacaccagcggggtgcaaacgtacaggcagaagcgcatcgggttgatgatacgcaaagccacagcttctggcgcaatcataccgatgcgtttcggggttaaatccgcaaacaggataaacatgccagtcactaacgagaaagagagaataaagctcagttgctcagagagctctgccgacatatagcgggagaacaggctgtgaaaagctggagaaaatgccgcatcaccgacgataccgccgagaatcgccactgcgttcagaccgatttggaccacggtaaagaacatgccgggattttcctgcatattcagaacgcgttgggcatttatattgccttcatcagccagcagtttaagtttgattttgcgtgaggcggcaagcgagatctcggacatcgagaagaacgcacttacagcgatcaagcagagtatgactaaaatactgtttaacatatcttatccgacctttcaggccagatcctcggaaggggaagttgattaatttgtgtgaaatacacattgaaagccgattcgaagaaagtgaaccggcattttcagtggctagtatagcgtaaggtactgtaaagccgccagagggttaaaattcagacagctgaaaaatgcaaaactgcctgatacgctatgccgatcaggcctacgcagtccttgcaatatattgaatttggacgattttgtaggcctggtaagtcgtttacgccgcatcaggcatagacaaagagcactttatcaacaaactacatttgtacccgtaacgctatgcttccggcggcagacagacgccaattccgccaattccacagtaaccatacgggtttttatgcagatattgctggtggtcatcttcggcataataaaacggtgtggcgttagcgatttccgtggtgatgtgacgatcgtcatcggcggcaagcatcgccgcctgaaaacgttccagactggcgcgagctgcggcatcctgttctggggtcagcggataaatcgctgaacgatactgcgtgccgtggtcattgccctgacgcattccctgggcgggatcgtgattctcccaaaatacctgtagcaactgctcatagctgatgacggaaggatcgtaaacaatgcgtaccgcttcggcatgacccgtatcaccggagcacacttcccgataagtcggatttggcgtatagccgccggtatagcctgcggcggtgctgtaaacgccgggtaactgccagaacagacgctccacaccccagaaacaacccatcgcaaaaatggcaatctccattccgtcaggtacattggtcattgagtgaccgttgaccgcatgcagcgtggctacgggcatcggggtgttacgtccaggcagggcatcggcgggggaaaccagatgctttttatcaaataaactcatggtgtcgctctcccgaaaatcggtcattggggttaaggttgtaacaagaggcgtatttgcacacaataaccaccgtgaataggtctaaagtaaaacataagaaatatttggggtttagtctgctttttaatccatattactggatttttgttaagccgtttaacggcgttccaggggcaggaaaaaaggatattcaggagaaaatgtgcgctatatccgacagttatgctgtgtaagcttactctgcttaagcggatctgccgtcgccgcgaacgtccgtctacaggtcgaggggttatcgggacagctggaaaagaacgttcgtgcgcagctttctacgattgaaagtgatgaagtgacgccagaccgtcgctttcgcgcacgcgtcgatgatgccatccgcgaaggtctgaaagcgctgggttattaccagccgaccattgaatttgatctccgtccaccgccaaagaaagggcggcaggtattgatcgccaaagtcacgccaggcgtgccggtgttaattggcggcaccgatgtggtattgcgcggcggcgcgcggaccgataaagactatttgaaattgctcgatactcgcccggctattggcacggtactgaaccagggcgattatgaaaatttcaaaaagtccttaaccagcattgcgttgcgtaaaggttatttcgatagcgaatttaccaaagcgcagctgggcattgcgctcggcctgcataaagccttctgggatattgattataacagtggcgaacgttaccgctttgggcatgtgacctttgaaggatcacaaatccgcgatgaatacctgcaaaatctggtgccgtttaaagagggcgatgagtacgaatcgaaagatctggcagaactgaaccgccgactttctgctaccggctggtttaactcggtggtggtggctccacaatttgataaagcgcgcgaaacgaaagtattaccattgacgggcgtggtttcgccgcgaacagaaaacaccatcgaaaccggggtcggttactctacggacgtgggaccgcgcgtgaaagcgacgtggaaaaagccgtggatgaactcttatggtcacagtctgaccaccagtactagtatttccgcgccggaacagaccctcgacttcagctataaaatgccgctgctgaagaatccactggaacaatattatttggtgcagggcggttttaagcgcactgacctgaacgataccgaatctgactccactacgctggtggcttctcgctactgggatctctccagcggctggcagcgtgccattaacctgcgctggagtctcgaccactttactcagggtgaaattaccaataccacgatgctgttttatcctggggtgatgattagccgcacgcgttctcgtggtggcctgatgccaacctggggcgactcgcaacgctactctatcgactactccaacacggcctggggttcagatgtcgatttctccgttttccaggcgcagaacgtctggatccgcacactgtacgatcgccatcgttttgttacacgcggcacgctgggctggattgaaaccggtgatttcgacaaagtaccgccggatctgcgtttcttcgccgggggcgaccgcagtattcgtggctacaaatacaaatctatcgctccgaaatacgccaacggtgacctgaaaggggcctcgaagttgataaccggatcgctggaataccagtacaacgtgaccggaaaatggtggggcgcggtgtttgtcgatagtggcgaagcggtaagcgatattcgccgcagcgactttaaaaccggtaccggggtcggcgtgcgctgggaatcgccggtcgggccaatcaaactcgattttgccgtaccggtcgcggataaagacgaacacgggttacagttttacatcggtctggggccagaattatgagtttatggaaaaaaatcagcctcggcgtggttatcgttatcttactgttgctgggatcggtggcgtttctggtgggcaccaccagcggcctgcatctggtatttaaagcggcggatcgctgggtgccaggactggatattggcaaggtcaccggcggctggcgcgatctcaccttgtctgacgttcgttatgagcagccaggcgtggcggtaaaagcgggcaatctgcatctggctgtcgggcttgagtgcctgtggaacagcagtgtttgtattaatgatctggcgctgaaagacattcaggtcaacatcgacagtaaaaaaatgcctccttctgaacaggttgaagaagaggaagatagcggtccgctggatctctccacgccgtatcccatcaccctgacacgggtggcactggacaacgtcaacattaagattgatgacaccacggtatcggtgatggacttcacctccggcctgaactggcaggagaaaaccctgaccctgaaaccgacgtcgctgaaaggcctgctgattgctctgccgaaagtggcggaagtggcgcaggaagaagtggtcgaaccgaaaattgaaaatccgcagccggatgaaaagccgctcggcgaaacgctgaaagatctcttttctcgcccggtattgccggaaatgaccgacgtgcatttgccgcttaacctgaacattgaagagtttaagggcgagcagctgcgcgtgacgggcgacacggacatcaccgtgagcaccatgctgctgaaagtgagcagcattgacggcaatactaaactggacgccctggatatcgattccagtcaagggatcgtcaacgccagcggcacggcgcagctgtcagacaactggccggtggacatcactctcaacagtacactgaacgtggagccgttgaaaggtgaaaaagtgaagctgaaaatgggcggcgcgctgcgcgaacagctggagattggcgttaatctttccggtccggtggatatggatttacgcgcccagacgcgactggcggaagccggattgccgctcaacgtggaagtgaacagcaaacagctttactggccgttcactggtgagaagcagtatcaggcggatgatctgaaactgaaacttaccggcaaaatgaccgattacacgctctctatgcgtacggcagtgaagggacaggagatcccgcccgcgactattaccctcgacgccaaaggtaatgaacagcaggtcaatctcgacaaactcaccgtcgcggcgctggaagggaaaactgaactcaaggcgttgctcgactggcaacaggccattagttggcgcggtgagctaacgcttaacggcattaacaccgccaaagagttcccggactggccgtcgaaactcaatggcttgattaaaacccgcggtagcctgtacggcggcacctggcagatggacgtgccggagttgaagctgaccggtaacgttaaacagaacaaagtgaacgttgacggcacgctgaaaggcaacagttatatgcagtggatgatcccagggcttcatctggaactcgggccaaacagtgccgaagtgaaaggcgagctgggggtaaaagatctcaatcttgatgccaccatcaacgcgccggggctggataacgcgctgccggggcttggcggtacagcgaaagggctggtgaaagtacgcggcacggtggaagcgccacaactactggcagatatcaccgcgcgcggcctgcgctggcaggaactttccgtggcgcaggttcgcgtggaaggcgatatcaaatccaccgatcagatcgccgggaaactcgacgtacgcgttgagcaaatttcgcagccggatgtaaatatcaacctcgtcaccctgaatgccaaaggcagcgaaaagcagcacgagctacagttgcggattcagggggagcctgtctccgggcagcttaatctggcaggaagttttgatcgcaaagaagaacgctggaagggaactcttagcaatacccgcttccagacgccggttggcccgtggtcgctgacccgcgatattgcgctggattaccgcaataaggagcaaaaaatcagcatcgggccacactgctggcttaacccgaatgcggaactgtgcgtgccgcaaactatcgatgcgggggccgaagggcgtgcggtggtgaatctcaaccgcttcgacctcgccatgctgaaaccgtttatgccagaaaccactcaggccagcggtatcttcacgggtaaagcggacgttgcctgggacaccacgaaagaggggctgccgcagggcagtatcaccctttcggggcgtaacgtgcaggtaacgcaaaccgtcaacgatgcggcgctgcccgtggcgtttcagacactgaatctgacggcggaattgcgtaacaaccgtgccgaattgggctggaccatccgcctgaccaataacggccagtttgatggacaggtgcaggtgaccgatccgcaaggccgccgtaatcttggtggcaacgtcaatatccgtaacttcaaccttgcgatgataaaccccatctttacccgtggggaaaaagcagcggggatggtgagtgccaacttgcgtctgggtggtgatgtgcaaagcccgcagttgtttggtcagcttcaggttacgggtgtggatatcgatggcaactttatgccgtttgatatgcaaccgagccagcttgcggtcaactttaacggtatgcgctcgacgcttgccggtacagtacggacccagcagggtgaaatctacctgaacggtgatgccgactggagccaaattgaaaactggcgggcgcgggtaacggcgaaaggcagtaaagtgcggatcaccgtgccgccgatggtacgaatggatgtatcgccagatgttgtattcgaggctacaccaaacctgtttaccctcgatggtcgcgtggatgtcccttgggcgcgcatcgtggtgcacgatctgccggaaagcgcagtaggcgtctccagcgatgtggtgatgcttaacgataacctgcaaccggaagagccgaaaacggcgtcgattccgattaacagtaacctgattgtccacgttggcaacaatgtgcgcattgacgcctttggcctgaaagcgcggctgacgggcgatctcaatgtcgttcaggacaaacaagggctgggtctgaacgggcagatcaacatccctgaagggcgcttccatgcctatggtcaggatctgattgtgcgtaaaggtgagttactgttctctggtccgccagatcaaccgtatcttaatattgaagctattcgtaacccggatgctacagaagacgacgtaatcgccggagttcgcgtcactggtctggcggacgaaccgaaagcggagatcttctctgacccggcgatgtcgcaacaagctgccttgtcttatttgctacgtggacaagggctggagagcgatcagagcgacagtgcggcaatgacctcgatgctgattggtttgggggttgcgcaaagtggccagattgtgggtaaaatcggcgagacgtttggcgtaagcaatttagcgctcgacacccagggagtaggcgactcctcccaggtagtggtcagcggctatgtattgccaggtctgcaagtgaaatacggcgtgggtatatttgactctatagcaacactcacgttacgttatcgcctgatgcctaagctatatctggaagccgtgtctggtgtagaccaggcactggatttgctctatcagttcgagttttagcaatgcgaatatttgtctacggcagtttacgccacaaacaaggcaacagtcactggatgaccaatgcccagttactgggcgatttcagtatcgataactaccagttgtatagcctgggccactatccaggcgcagttccggggaacggaacggtacacggtgaagtttatcgtattgacaacgccacgctggccgaacttgatgccttgcgcaccaggggcggtgaatacgcgcgccagttgattcagacgccgtacgggagtgcatggatgtacgtttatcaacgacccgtcgatggattaaagctaattgaaagcggcgactggttagacagggataagtaaccatatgcatacgccaccttcgggtggcgttgttttttgcgagacgactcgcattctgttttgtaattccctcaccttttgcttttctctccgagccgctttccatatctattaacgcataaaaaactctgctggcattcacaaatgcgcaggggtaaaacgtttcctgtagcaccgtgagttatactttgtataacttaaggaggtgcagatgcgtattaccataaaaagatgggggaacagtgcaggtatggtcattcccaatatcgtaatgaaagaacttaacttacagccggggcagagcgtggaggcgcaagtgagcaacaatcaactgattctgacacccatctccaggcgctactcgcttgatgaactgctggcacagtgtgacatgaacgccgcggaacttagcgagcaggatgtctggggtaaatccacccctgcgggtgacgaaatatggtaaagaaaagtgaatttgaacggggagacattgtgctggttggctttgatccagcaagcggccatgaacagcaaggtgctggtcgacctgcgcttgtgctctccgttcaagcctttaatcaactgggaatgacgctggtggcccccattacgcagggcggaaattttgcccgttatgccggatttagcgttcctttacattgcgaagaaggcgatgtgcacggcgtggtgctggtgaatcaggtgcggatgatggatctacacgcccggctggcaaagcgtattggtctggctgcggatgaggtggtggaagaggcgttattacgcttgcaggcggtggtggaataaggtgtgtttatttatcgcgggcataaaaaaacccttactaaccgaagcccggcgttcagggttattacgccagaagaacttatttattctttgcgcgctcgaaggaggcaacgatttcagctttagcggcttctgcgttttcccaaccttcaactttcacccacttgcctttttcgaggtctttgtagtgctcgaagaagtgagcgatttgcgctttcagcagttcaggcagatcgttaacgtctttaatgtgatcgtattctttgctcagcttgctgtgcggaaccgcaaccagtttcgcatcttcaccggcttcgtcggtcattttcagaacgccaaccggacggcaacggatcacagaacccggctgcagcgggtacggagttgggaccagtacgtcaaccgggtcaccgtccagagacagggtgtggttgatgtaaccgtagttgcatggatagaacatcgcggtggacatgaagcggtcaacgaacagtgcgccgctctctttgtcgatttcgtatttgatcggatctgcgttagccgggatctcaataacaacgtagatgtcttccggcagatctttacccgcagggacgttgagtaagctcatgtctgtttcctttaaaaatatgtggcaaacaagtgccgagtattatagccaactcgcgccgaatgtcttcgcttgttttcgtcttcattttcctttttcaccagttttaagacggtatacagagcaggaaaatccataaccgtagccgcatttttcatagtgagatgaaagcgattacaaacttgtgattaacgttttatttacttttttgaagtgtgatgtaacgcaatctgttacataacgaattgtctatagttttttcgcgaacatcttttaaccaataataactaccccgacgaggacaaccctatgtggaaacgcttacttatagtctctgcagtctcggcagccatgtcgtctatggcgttggccgctccattaaccgttggattttcgcaggtcggatcggaatcaggctggcgtgccgcagaaaccaatgtggcgaaaagtgaagccgaaaagcgcggaatcacgttgaaaattgccgatggtcagcaaaagcaggaaaaccagattaaagcggtacgttccttcgttgcacaaggggtggatgcgatctttatcgctccggtggtcgcgacaggttgggaaccggtattaaaagaggcgaaagatgccgaaatcccggtattcttgctcgatcgttccattgatgtgaaagacaaatctctctatatgaccaccgtcactgccgacaacatcctcgaaggcaagttgattggtgactggctggtaaaagaagtgaatggcaaaccatgcaacgtggtggagctgcagggcaccgttggggccagcgtcgccattgaccgtaagaaaggctttgccgaagccattaagaatgcgccaaatatcaaaatcatccgctcgcagtcaggtgacttcacccgcagtaaaggcaaagaagtcatggagagctttatcaaagcggaaaacaacggcaaaaacatctgcatggtttacgcccataacgacgacatggtgattggtgcaattcaggcaattaaagaagcgggcctgaaaccgggcaaagatatcctcacgggttccattgacggtgtaccggacatctacaaagcgatgatggatggcgaagcgaacgccagtgttgaactgacgccgaatatggcaggtcccgccttcgacgcgctggagaaatacaaaaaagacggcaccatgcctgaaaagctgacgttaaccaaatccaccctttacctgcctgataccgcaaaagaagaattagagaagaagaaaaatatggggtattgagggttgctatgcctgatgccgattcgtaggccggataaggcgctcggcgcatccggcgatggtgcactgaagcctgatgcgacgcttaccgcgtcttatcatgcctactgggagcacgctttacaccgggggaaaccatgacgaccgaccaacaccaggagatcctccgcaccgaaggattaagtaaatttttccccggcgtcaaagcgttagacaacgttgatttcagcctgcgccgtggcgaaatcatggcgctgctcggtgaaaacggggcgggaaaatcaacgctaatcaaagcattaactggtgtataccacgccgatcgcggcaccatctggctggaaggccaggctatctcaccgaaaaataccgcccacgcgcaacaactcggcattggcaccgtctatcaggaagtcaacctgctacccaatatgtcggtcgctgataatctatttataggccgcgaacccaaacgcttcggccttctacgccgcaaagagatggaaaagcgcgccaccgaactgatggcatcttacggtttctccctcgacgtgcgcgaaccgctcaaccgcttttcagtcgcgatgcagcaaatcgtcgctatttgtcgggctatcgatctctctgccaaagtgctgatcctcgatgaacccaccgccagtctcgacacccaggaagtggagttactgtttgacctgatgcgtcagttgcgcgatcgcggcgtcagcctgatttttgtcactcactttctcgatcaggtctatcaggtcagcgatcggatcaccgtcttacgcaacggcagtttcgtaggctgtcgggaaacgtgcgagctaccgcagatcgaactggtaaaaatgatgctggggcgcgagctggatacccacgcgctacagcgtgccgggcgaacattgttgagcgacaaacccgttgccgcgttcaaaaattacggcaaaaaaggaacgatcgcaccgtttgatctcgaagtacgccccggcgagatcgtcggtctggctggattgctgggatcaggacgtaccgaaaccgccgaagtgatcttcggtatcaaacctgctgacagcggcacggcgttgatcaaaggcaaaccgcaaaacctgcgatcgccacatcaggcttcggtactgggcattggcttctgcccggaagacaggaaaaccgatggcatcatcgctgccgcctcggtgcgggaaaatatcatcctcgctctccaggcccagcgcggctgctacgtcccatttcccgcaaagaacagcaagagattgccgaacgctttatccgccagcttggcattcgcacaccttcaactgaacaaccgattgaatttctctccggcggcaatcagcaaaaagtgttgctttcacgttggctactgacccgaccgcaatttctgatcctcgatgagccaacccgcggcattgatgttggtgcccacgccgagatcatccgcctgattgaaacgctatgcgccgatggtctggcgctgctggtgatctcctccgaactggaagagctggtgggctatgccgatcgggtgattatcatgcgcgatcgcaaacaggtggcggagatcccgctggcagagctttccgttccggcgatcatgaacgccattgcggcgtaaggagaacagtgtgatgcctcaatctcttccggacaccactacgccaaaaaggcgctttcgctggccgacggggatgccgcagctggtagcactattgctggtgctgctggtcgatagcctggtagccccgcatttctggcaggtggtgcttcaggatgggcgtttgttcggtagccccatagacattcttaaccgtgcagctcccgttgcgttactggcgattggcatgacgctggtgatcgccaccggtgggattgatctctccgtaggggcggtgatggctatcgccggagccacaacggctgcgatgacggtcgcgggattcagcctgccgattgttttgttaagcgccctgggcaccggcatcctggcgggattgtggaacggcatactggtagcgatcctcaaaattcagccgtttgtcgccactctgatcctgatggtcgccgggcgcggcgtggcgcaactgatcaccgccgggcagatcgtcacgtttaactcgccggatctctcatggttcggcagtggatcgctgttgttcctgccaacgccggtcattatcgcggtgctgacgcttatcctgttctggctgttgacccgcaaaacggcgctggggatgtttatcgaagccgttggtatcaacattcgggcggcaaaaaatgccggggtaaacacgcgaatcatcgtcatgctcacttatgtgttgagcgggctgtgtgcggcgattgcgggcattatcgtggcggcggatattcgcggtgccgatgccaacaacgctgggttatggctggagctggacgccattctcgcggtggtgattggcggcggatcgctgatgggcgggcgctttaacctgctactttcggtggtgggggcgctgattattcaggggatgaacaccggaattttgctttcgggctttccgccagagatgaaccaggtggtgaaagcggtggtggtgctttgcgtgctgattgttcagtcgcaacgctttatcagtctgattaaaggagtacgtagccgtgataaaacgtaatttgccactgatgatcaccatcggcgtctttgtgttgggttatctttactgcctgacccagtttcccggttttgcttccacaagagtgatctgcaatatcctgaccgataatgcctttcttgggatcattgccgttggcatgacctttgtgatcctctcaggtgggatcgatctctccgtcggttcggtgatcgcctttactggcgtgtttctggcaaaagtgattggcgatttcggcctctcgccgctgctggcgtttccgctagtgctggtgatgggctgtgccttcggcgcatttatggggcttctgatcgacgccctgaagatcccggcatttatcattacgcttgcggggatgttctttttgcgcggcgtcagctatctcgtttcggaagagtcgattccgataaaccatcccatttatgacacgctctcaagccttgcgtggaaaatccctggcggcggtcgcttaagtgcgatgggactgctgatgttggcggtggtggttatcggcatattcctcgcgcatcgtacccgttttggtaatcaggtatacgccattggcggcaacgcaacgtcggcgaatctgatggggatttccactcgcagcaccactattcgcatttatatgctctccaccggactggcaacgctggcggggattgtcttctcgatttatacccaggccggatatgcgctggcgggcgtaggtgtggaactggatgctatcgcctcagtggtaattggcggtacgcttttgagcggtggcgttggaacggtattagggacgctttttggcgtggcgattcagggactgattcagacttacataaactttgatggcacgctgagttcctggtggacgaaaatcgccatcggtattttgttgtttatttttatagcattacagcgtggattaacggtgctgtgggagaatcgtcagagttcgccagtgacaagagtcaacattgcgcagcaataaaaacgcctctccgtgtggagaggcgcaggagattacgcgtccgggaactcacggataaagcgttcgacatcttcaaccatatggtcgttgccgacaaagaatgaacggcgctggtgcagggtttccgggatgatatccagaatacgctctttgccatcgctcgctttaccgcccgcttgttccgccaggaatgccatcgggttgcactcatacagcaaacgcagtttgccgtccgggtggctggcggtgcttgggtagagataaataccgcctttcagcaggttacggtggaaatccgcgaccagtgaaccgatataacgtgaggtataagggcggttggtggatttatcttcttcctggcagaatttaatgtacttcttcaccccgttcggaaacttaatgtagtttccttcgttgatggagtaggttttgcctttctccgggaagcgcatccgttcctggcacaggcagaaaacgccgagcgaaggatcgtaagtaaaggcgtgaacaccgcatccggtggtgtaaaccagcatggtagaggagccgtataccacgtaacctgccgcaacctgtttgttaccaggctggaggaaatcttcttccgttaccggcgtgccaacaggcgtaacgcggcggtagatggagaaaatggtaccgacagagacgttaacatcgatgttggacgagccatccagggggtccatcagcaccacgtattttgcgtgttcacagccttcaaagacgacaatctcatcttcttcttcagaggcaatgcccgcaacgatatcgcgtgctttcagtgcggctttcagtttttcattagcgaacaagtcgagtttctgctgaacctcgccctgcacgttctcagcaccgctggcacccaggatatcaaccagtcctgctttgttgatatcgcgatggataatcttggcgcccagttttattgccgacagcaaagcagtgagctcaccggtagcatgagaaaactcgtgctgcttttcgacaataaattcacctaacgttttcataaaactttccctgcaatgtttatggagtaaagcgaccgcaacaatcttaacaaataatctcaatgttgcgctcaggtgaatcgcgccagcaaattacggattatcctgaaatgcgtttctcacttgcccgacatatgcgtaaaatgagcggcagattaaaaaaggatagtgacgtatgcgcattcatattttaggaatttgtggcacatttatgggcggtctggcgatgctggcgcgccagttaggccatgaagtaacgggttcggacgccaatgtgtatccgccgatgagcaccttacttgagaagcaaggcattgagctgattcaggggtacgatgccagccagctcgagccgcagccggatctggtgattattggcaacgccatgacccgtggaaatccgtgtgtggaagcggtactggaaaaaaatatcccttatatgtcaggtccacagtggctgcacgattttgtgctgcgcgaccgctgggtgctggccgttgccggtacacacggcaaaaccaccaccgcgggaatggcgacctggattctggaacagtgtggttacaaaccgggctttgtaatcggcggtgtgccggggaactttgaggtttcggctcatctgggcgaaagcgacttctttgttatcgaagcggatgagtatgactgcgccttcttcgacaaacgctctaaatttgttcattactgcccgcgtacgctgatcctcaacaaccttgagttcgatcacgccgatatctttgacgacctgaaagcgatccagaaacagttccaccatctggtgcgtatcgttccggggcagggccgtattatctggccggaaaatgacatcaacctgaaacagaccatggcgatgggctgctggagcgagcaggagctggtgggtgagcagggtcactggcaggcgaaaaagctgaccaccgatgcttccgaatgggaagttttgctggatggcgaaaaagtgggcgaagtgaaatggtcgctggtaggcgaacataatatgcacaatggcctgatggcgattgcagcggctcgccatgttggtgtagcgccggcagatgccgctaacgcgctgggttcgtttattaatgctcgtcgccgtctggagttgcgtggtgaagcgaatggcgtcacggtatatgacgattttgcccatcacccgacggcgattctggcaacgctggcggcgctgcgtggcaaagttggtggtacggcgcgcattattgctgtgctggagccgcgctcgaataccatgaaaatggggatctgcaaagacgatctggcaccttcattaggtcgtgccgatgaagtcttcctgctgcaaccggcgcatattccgtggcaggtggcagaagtggcagaagcctgcgttcagcctgcacactggagtggcgatgtggatacgctggcagatatggtggtgaaaaccgctcagcctggcgaccatattctggtgatgagcaacggcggttttggtgggatccatcagaaactgctggatgggctggcgaagaaggcggaagccgcgcagtaattcggccttagccagatatagtatgcgtaggccggataaggcgttcacgccgcatccggcatttgagcatagtgcctgatgcgacgcttgatgcgtcttatcaggcctacaggtgcaccgtatccggcaaaccatactcacatcaacaacgaaaattacccttcgttctccgctaactcgcgcagatactggaaaatctggcgtgcggatttcggcggcttattcccttctttctctttcttcgcgttgcggatcagagtacgcagttgctgacgatcggcatcgggccacagatttaatacctcagcgatggcgtcatcaccttgatcgatcagacgatcgcgcaggttttccagtttatggaacagcaccacctgctggttgtgacggtttttcagcttatccagcgcctgacgaataggctctacgtcgcgctggcgcagcatcttaccgatgagctgcaactggcggcggcgaccttccatcttaatacgctgggcgagctcaatagccgcgcgcagatccgcatctaacgggatcttatccagcgcgtttttccccagatcaacaatttccgcgccaaggcgttttagctcctcggcatcacgtttaatttcacttttactgacccagataatttcatcgtcttcgtcttcgatgtcatcaccgggaacgtcgtcgagccagtcttcgggctgcttagtcatctcaggctccttaaaaaaagaggctaatgttaccagttaagatgcgcactgaaaaacggttctctgttagacttcagagaaactctctacattatggcacttgcaatgaaagtaatctctcaagttgaagcgcagcgcaagattctggaagaagcagtttccactgcgctggagttggcctcaggcaaatcggacggtgcggaagttgccgtcagcaagaccaccggcattagcgtaagcacgcgttatggtgaagtggagaatgttgaattcaatagcgatggcgcgctggggatcactgtttatcaccagaaccgcaaaggtagcgcatcatccaccgatttaagcccgcaggccattgcccgtactgtacaggcggcgctggatattgcccgttatacctcgccagatccctgtgccggcgtggcagacaaagagctgctggcctttgacgcaccagatctcgacttgttccaccctgcggaagtttccccggatgaagccattgaactggcggcccgcgcagaacaggcggcattgcaggcggacaaacgcatcaccaataccgaaggtggcagctttaacagccactacggtgtcaaagtttttggcaacagccacggcatgttgcagggttactgctcaacgcgtcattcgctctccagctgtgtaattgccgaagaaaatggcgatatggagcgtgattacgcctacaccattggtcgtgcgatgagcgatctgcaaacgccagagtgggttggggccgactgtgctcgccgtactttatcgcgtctgtcaccgcgtaaactctccaccatgaaagcgccagtcatttttgccaatgaagtggcaaccgggctttttgggcatctggtgggggcgatagcgggtggatcggtttatcgtaaatctaccttcctgctggattcgctgggtaaacaaattctgccggactggctgaccattgaagagcatccgcatctgctgaaagggctggcgtcgacgccattcgacagcgaaggtgtgcgcaccgagcgtcgcgatattattaaagatggcatcctgactcagtggctgctgaccagctactcggcgcggaaactggggctgaaaagcaccggacatgcgggcggtattcacaactggcggattgccggacaaggtctaagcttcgagcagatgctcaaagagatgggcaccgggctggtggtgacggaattgatgggccagggcgtgagtgccattaccggtgattattcccgtggtgcagcgggcttctgggtagagaatggcgaaattcagtatccggtgagcgaaatcaccatcgcaggtaatttaaaagatatgtggcgcaatattgtcaccgtcggtaacgatattgaaacacgcagtaatatacagtgtggttctgtgctgttgccggagatgaaaatcgccggacagtaaaaaaactggcgcgacctgccgcgctataaactaaaaaattacacaaaatcattcgcactgcatcgagacggaaagtgaatgagggccggggagcgtactcgcagtacgtgacccggtcgaatgagcgtagtcgtcgatgaggcagtgtgaaggatgaagtgtaaataaaaaaggaactattcttgcagtctcctcgttggtattcagttcggcgtcatttgctgctgatctcgaagacaatatggaaaccctcaacgacaatttaaaagtggtcgaaaaagccgataacgcggcgcaagtcaaagacgcgttaacgaagatgcgcgccgcagcgctggatgcgcaaaaagcaacgccgccgaagctcgaagataaatcaccggacagcccggaaatgaaagatttccgccacggtttcgacattctggtcggtcagattgacgacgcgctgaagctggcaaatgaaggtaaagtaaaagaagcgcaggctgctgcagagcaactgaaaacgacccgcaattcatatcacaagaagtatcgttaattcctcatttccctgttgcctgcactcaggtaacagggaacttatcatcgcaaatgatgcaccacctgattgctgctgccgcgccagatcagggaagggtcttttaaatcctgcacaaatttgccgtcgaccagcacgttaatcaaatcaacaacctgcatttgcgcagcgttgagttcgtcgagtttatagcctgtccacacccagatgtctttacccggacactcggcgcggatgcgttgtaccagtttcagaatatccggcacgttttgcggatgcagcggatcgccgccggagagggaaataccctggcgtttgatacgagtgtcattcagatcgttaatgatctggtcttccattgctttggtaaatggctgaccggaatttacccgccatgtgcttttgttatagcaaccggggcattcatgaacacacccggagacaaacagggtgcaacgagtgccggggccgttgacgatgtcgacaggatagtactgatgataattcattatttcgcctggcttatcagtccgcgtgtaggctgcatccggtaatcaatgcctgatgcgacgctgtcgcgtcttatcagacctggagcaattgccaaatgtaggccggataaggcgtttacgccgcatccggcatttgcttagctcagagtgaagattaacctatctgcccattccccaaatgtttaacgcggcgcttaacttcttcctgcttaccagcgttaaacggacgtgcatccgggctacctaaatatccgcacacgcggcgagttaccgacacacgggaggcgtcatggttaccacatttcgggcaagtgaagcctttgctggtgcactcgaactcaccggtaaagccacactcgtagcactcatcaatcggtgtattggtgccgtaatacggtacatgctgatagctgtaatcccagacatcttccagcgccttcaggttgtgctgaatgtttggatactcgccgtagcaaatgaaaccaccgttcgccagcggcgggtaaggcgcttcaaagtcgatcttgtcgtacgggttcaccttcttctccacatcgaggtggaaactgttggtgtagtaacctttatcggtcacgcccggcaccacgccaaactcagcagtatcgagacggcagaagcgatcgcacaggttttcactcggcgtgctgtagagactgaaaccataacccgtttcttctttccactgatccactgcctgacgcagacgttcaacaatggcgatacctttcgcgcgaagctgctcgttgtcgtaaacatgctcgccgccgaacagcgcgttaatggtttcgtggatgccgatgtaacccagcgaaatagacgcacgaccgtttttgaagatttcagaaacatcatcgtcagcattgagacgcacgccacaagcaccttccatatagaggatcggggccacgcgcgctttcacgccttcgagacgagcgatacgggtcatcagcgccttacgtgccagcaccagacgttcatccagcagcttccagaaggtggcttcatcgccttttgcttccagagcaatacgcggcaggttcaggctgatcacgccgaggttgttacgaccatcgtggatctgctcgccgttttcattttcccacacgccgaggaagctgcggcagcccatcggagttttaaacgaaccggtgactttcactacctgatcgtagttcaggatatccggatacatgcgcttgcttgcgcactccagcgccagctgtttgatgtcgtagttcggatcgccttttttatggttcaggccatcgcgaatcgcaaacaccagtttcgggaacaccgcagttttacggtttttaccgaggcctgcgatacggttacgcaggatcgattcctgaatcaggcgcgattcccagctggtgcccaggccaaaaccaaaggttacaaacggcgtctgaccgttggcggtgtgcagggtgtttacttcgtactccagtgactggaaggcatcgtagcactctttgatggttcgagagttagcgtagccttcggcgtccgggatgttccactcttctgcggtcttgcgatgtttgttgtagctggcagtgacaaacggtgccagcacttcatcgatacggttaatggtggtgccgccataaatatggctggcaacctgagcaataatctgcgcagttaccgcggttgccgtagagatcgacttcggcggttcaatctcggcgttccccattttaaagccctgggtcagcatgcctttcaggtcgatcaacatgcagttgaacatcgggaagaacggtgagtaatcgagatcgtgatagtgaatatcgccacgctcatgtgcctgcaccacgtcacgcggcagcaggtgctgacgtgcatagtgtttagccacgatcccggccagcaggtcgcgctgggttggaatcaccttgctgtctttgttggcgttttcgttgagtaacgaggcgttggtctgctcgaccagaccacggatctcctggttcaggcgaccgcgtttttcacgttcaatgtcgcgatcgtgacggtactcgatgtaagcacgagccagttgtttgtatggacctgacatcagctgattttcaactgcggtctggatctcattgatatccacctggttgcggccctgcatctgctcgctgacaaccgcggcaacagtggcgcaataatcggcatcatcgacttccgctgctttagctgcacgcagaatcgcttctttgatgcgctctgatttaaacggcactttgcagccgtctcgtttcatcacatgcggtgtcatgatcgctccatatttttaagaacaggttatccacagaaattgggaaaggcgttttccggttttttcgtttcgttttccggtgctttccgcaatcgccatccgcttatccacaacgccgcacctttttcgtggggagctgtagtagcaattatagtcgattaatacaacatattgggttgggacgcattttaaagtctatatatagtgctttgcatcaaggatgtttgagctttttttgatgtagctcaaagtaaaaagcagagcgtacggatgacgggcgctacagcgatatgtaaattttttaatgaatttgctggttgaaaaatcaacaaaaacaacatactgacagacaaaaccccggaatgaccggcattaccggggcttagggaagatttacttctgtaaccaccagacagcctcaaaaggccgtaaattcatggcacagggttgtggtgaggcttcttcgtagttatgcatcacaagctgccagttgccgcgcatttgccctgcctgccagggttggatctcacggctaaggttggcaatgaccagcaaggtttgccccttccattcacggcgatagcaccacaatacagggctgtttggcagcagatcctggtaattgccccatgtcaggatggcttcctgcttacgcagtgcgattaacttttggtaggtgtaaaacaccgaggaatcatcggccagcgcggcttctacgttgatttgttgatagttatcgcccaggccaatccacggttcgccagccgtaaacccggcattatcgccgttgctccattgcatgggcgtgcgactgttgtcacgggatttactggcgaggattgccaataactcgtcggcatcacgcccatcgttgcgcagctcggcaaacatattgaggctctctacgtcgcgatagtcagtaatgcgcgtgaaatgcgggttggtcatgccaatctcttcgccctggtagatatacggcgttccctgcatgccatgcagcaccatcgccagcatttttgccgcaggcacgcggtattcaccttcatcaccaaagcgagaaacaatgcgcggctgatcgtggttacaccagaacaaggcattccatgctacgttgtgcattccttgttgccagtggcggaacaatgttttcaacgccacaaagtcaggtttagccagcgtccatttttcaccaccgggataatcgaccttcaggtgatgaaaattaaaggtcatcgacaattcactgcctgtcagagccgcgtatcgctggcaatgctcaaggctggtggaggacatttcacctacggtcattaacccgcgtggcgtaaacacatcgcggttcatctcgtgcaaaaactcgtgtgctcgtggcccgtcggtgtagaagcgacgcccgtcgccgtccaggtcttcagggaaacgcgggtctttggagatcagattcaccacatccaggcgcaacccgtcgaccccacgatcggcccagaactcacagacttttttcagctctgcgcgtaccgctggattctcccagttgagatccgcctgttctggtgcaaagagatgcaaatagtactgttcgctttccgcatgccagcgccacgcactaccgccaaattttgaacgccagttgttcggtggcgtttctggttctccatcgcgccagatataaaactggcggtaagggctttctttgttcagcgcctcgcgaaaccaggcatgttgggtagaggtatggttaaacaccatatcgagaatgatacgaatcccgcgcgattttgcctgcgtcaccagttcgtcaaaatcgtccagcgtgccgtaggtgggatcaatcgccgtatagttcgctacgtcgtaaccgttatcgacctggggagagacataaaagggggttagccagatggcatcaacgcccagtttatgcagatagtccaggtgttggataacgccacgtaaatcgccggtaccgctacccgtggtgtcctgaaaactctttggataaatctggtagataacgccgttttgccaccagtggggaagatgagtcattacgttattcctgcgaatgcgagggggcgcaattgcgccccgaagaaaattaaacaatgtccagcgtgcccaggcggtatttccgctgatagataaacgaggtgagtacaatcgggatgatgatggcgatagccattgccagcgcaaacacctgccagtagctcggttgaatcgagagaattcccggcaggccgcctacgccgatgccattcgccataacgccgttcaggccgcatagcaatcctgccagaccagaaccaatcatcgcgcacagcatcgggaagcgatatttcaggttgatgccgtacattgcaggctcagtgaccccaagccaggcggagatagcggcaggcacggagatctcgcgttcattgtgcttgcggctggaaatgataatgcctatcacggcggagccctgagcgatattcgacagcgcaatcagcggccacactggcgtaccacccatgctttgaatcatctgcaaatcaatagcaagcgtggtctggtgtacaccggtgatcaccagcggggcgtacaggaagccaaacaatgctgcgccaatcggagcaaagctgccggtcatcaggtgacgtaccgcaaaggcaacgccatcgccaatcatgcgaccaaacggaccaatcagcgcatgggcgaggaacaccgcgaggatcagcgaacagacgggtaccaccaccagatagaggtaatccggcacgatgcgtttaaggcgagtttcaataacgcccagcgccagtccggctaacagtgccgggatcacctgcgcctgatagcctactttggcgatgctgaacatgccaaagtcccacacttccggcagctgctgcccgagcagataagcgttcatcagctgtggagaaaccagtgtcacgccaagcacgataccaaggatcggcgtgccgcccatttttttcaccgctgaccagcaaataccgaccggcaggtagaagaagatcgcttcaccgatcaaccacagaaaatcgtagatcgtttgcagggaagggtacatttgcgccagcgtctgaccgttgctcatgggcaaatcgccgatcacattgcgaaaaccgaggatcaaaccgccgctaatcaacgcgggcagcaacgggaagaagatcaccgcgaaatgagagatcaactgctcatgccatttcatattatgccgggcggctttttttacctgctctttatcaacctgcgcctgtccggttgacgcaatcagtgcttgatagtaatcacccacgttggtgccaatcaccacctgaaattgcccggcattggtgaaacagcctttcaccatagggagttgctcaatttctttcggtctggcattggccggttggttgaggacaaagcgtaggcgagtaatacagtggctcaccgtcgcaatattgccgcgcccgccgaccagttcaatcaaccgatcgatatccgtttggtttattttgctcatcataaagccccatggcagatgacatttttggttggctgcagaatatattgcgcggaaaaatttaaaaacgggaacgttcccgaaacgcagcgaagatcacaatttatcgttcaggaaacgatcaggacagggtggcggggatgatgatttgttgcggttcgctgcgcccggttacctgcgcgatcaactggcaagccgcctggcgtccagcttcggcgtaaccgggatctacggttacgatctccggatggaggaatttcattaacggcgtattaccgacgctcgccagttgcaaggtgtcgatgcgttgctcttgcaggtatttacttgcgccaagtgccagcgtgtcggttgcgcacagtaaggcggtagtttcaggcgtaatcacttttgcaacgttctcatagccttgcttcatagcaagccctggcagggcggcaacgggatgcagtttatgcgctttgcagaacgccaggtaggcttcgtgacgtcgcttaccggttgtcacgtcactgtgcggcacgccgagataactgatattacgatgcccctggtcatacagccgttgcatcaggattttgattgccccttcgtcgtcataacagaccgaagcaaagccttttgcgtcacgcgccagcagaaccagcgatgactgccagtgggctaacatttcttctgttatgccagtaaaaccgaacagcactacgccgtcgatattacgccgtttcagcactcccaaatgttcggcaactaattgcggggaaaactgactttccatcatgattgggtcgtaaccttgttcatagaacgctggcagcatggtttgaacggcgagattttctgacaacgaatccagacgggtaacaatgatggcgaccactttatcgctttgcccacgcatagcgcgcgcagagcgggaaggggaaaatccatgctgattcatcactgcttcaacacgctcgcgggtgagctggctcacgccgctttcgttattcagcacccgggaaactgtagatttccccacgccgcttaagcgcgcgatatctttgatggtcagccgattttgcatcctgttgtcctgtaacgtgttgtttaattatttgagcctaacgttacccgtgcattcagcaatgggtaaagtctggtttatcgttggtttagttgtcagcaggtattatatcgccatagatgctacgaatattattggattctccttattatttgcggcgcttttttcacttaccggaggttatatggaacctgatcccacgcctctccctcgacggagattaaaacttttccggtaagcccgtcttttcacggcgttaccggatgcgtaaggccgtgacgttttaacgtccctgctcagctttattaccttcaggtaaggcttcgccacgcctgaagacatttctgtactgtttcagacagtgcggagggactccttatgtttaaagaaatttttacccggctcattcgccatttaccttcccgtctggttcatcgtgatccattgcctggcgcgcagcagacagtgaatacggtggtcccgccgtccttaagtgcgcattgcctgaaaatggcggtgatgcccgaagaagaattgtggaaaacgttcgacacccatccggaagggttaaatcaggcggaagtggaatctgcccgcgaacaacatggtgaaaataaattacccgcacaacaaccgtcgccgtggtgggtacatttatgggtctgctatcgcaacccctttaatattttactcaccattctcggcgctatttcttacgccacggaagatttatttgctgcgggcgttatcgcgctaatggtcgctatttctacgttgctgaactttattcaggaagcacgttccactaaagcggcagatgccctgaaagcgatggtcagcaatactgcgacggtgctgcgcgtaattaacgacaaaggcgaaaatggctggctggagatcccgatcgaccagctggtgcccggcgatattataaaactggcggcgggagatatgatcccggcagatttacgtatcttgcaggcgcgggatctgttcgtcgctcaggcgtcgttaaccggtgagtctctgcccgtagaaaaagccgctaccactcgccagccggagcacagcaatccgctggagtgcgacacgctgtgttttatgggcaccaccgtggtgagcggcacggcacaagcaatggtgattgctacaggtgccaatacctggtttggtcaactggcggggcgtgttagtgagcaggaaagcgagccgaatgcctttcagcaagggatcagccgcgtcagtatgctgctgattcgctttatgctggtgatggcaccggtggtgctgttaatcaatggttacaccaaaggcgactggtgggaagcggcgctgtttgcgctttcggtcgcggtaggcctaacgccggaaatgttgccgatgattgttacctcgacgctggcgcgcggcgcagtaaagctgtcgaaacagaaagtgatcgtcaaacatctggatgctattcagaactttggcgcaatggatattctgtgcactgataaaaccggcaccctgacgcaggataaaattgtgctggagaatcataccgatatctccggtaaaaccagcgaacgcgtgctgcatagcgcgtggttgaacagtcattatcagaccggacttaaaaacctgctcgatacagcggtgctcgaaggtacggatgaagagtcagcgcgctcgctggccagtcgttggcaaaaaattgatgagattccgtttgatttcgagcgtcgccggatgtcggtggtagtggcagaaaataccgagcaccatcagctggtttgcaaaggtgcattgcaggaaatcctcaatgtgtgttcgcaggtgcgtcacaatggcgagattgtgccgctcgatgacatcatgctgcgtaagattaagcgggttactgatacgctgaatcgtcaggggctgcgcgtggttgcggtggcgacgaaatacctgccagcgcgtgaaggagattaccagcgggcggatgaatccgacctgatcctcgaaggatatattgcttttcttgatccgccaaaagagacaaccgctccggcactgaaggcattaaaagcgagtggaattaccgtaaaaatccttactggcgacagtgagttagttgcagcgaaagtgtgccatgaagtggggctggacgcgggagaggtggtcattggtagtgatattgaaacgctatctgacgacgaactggcaaatcttgcacagcgtaccacgctgtttgcccgcctgacgccgatgcataaagaacgcattgtgaccttactgaagcgcgaagggcatgtggttggctttatgggcgatggtattaatgatgcgcccgccttacgcgctgcggatatcggcatttctgtggacggcgcggtagatattgcccgtgaagcggctgatatcatcctgctggaaaaaagcctgatggtgctggaagagggggttattgagggacgtcgcactttcgccaacatgctgaaatacatcaaaatgacggcgagctctaacttcggtaatgtgttcagcgtgctggtagcgagtgctttcttgcccttcctgccgatgttgccgttacacttgcttattcagaacctgctgtacgatgtgtcacaggtggcgatcccgtttgataacgtcgacgacgagcaaattcaaaagccgcagcgttggaatccggcggatctggggcgctttatgatcttcttcggaccgatcagctcgatcttcgatattttgacgttttgcctgatgtggtgggtattccatgccaacacgccggaaacgcaaacgctgttccagtcgggatggtttgtggtgggcttactgtcgcaaacgctgattgtgcatatgatccgcacccgccgtgtgccgtttattcagagctgtgcatcgtggccgttaatgatcatgaccgtgatcgtgatgattgtcgggatcgcattgccgttttcaccgctggccagttatctgcaattacaggcgctgccgttaagctatttcccgtggctggttgcgattctggcagggtatatgacattaacccagttggtgaaagggttctatagccgtcgttacggctggcaataaagaataaactgggcacgatagccccgattcagattgtagacaaagtgagttttgttcatgccggatgcggcgtaaatgccttatccggccaacaaattcaataaattgcaggaatcacgtaggcctgataagcgtagcgcatcaggcgattttgcgtttgtcatcagacttaatccgggcatgatagcccggatttccatcaagattagcgacgaacagcgatcgcttcgatctcaatcttcacgtctttcggcagacgggcaacttcaacgcaagaacgtgccgggaaggtggcgttgtgttcggtgaagaaggcttcgtaagtggcgtttacggttgcgaagtcgttcagatcttttacaaacacggtagttttaacgatgtcgcccactttcaggccagcggcttcgacgatcgcttttacgttatccagcgactgacgtgcctgtgcagcgacgtctgccggtacttcgcccgttttcggatttaccgggatctgaccggaggtgatgatcatattgcccagatcaacgccctgtacgtaaggaccgatagctgccggtgcattttccgtcgcgatagttttgctcatgatttctcctttattacagcggtaaaaagtctggctcattatagggagccagacttttattaccaaccgcaattaattggccagcaccacattatgggaaaactctttttcacagtatttgcatttgagcgcgatatcattggcgcgttttcgcacggcaaagctggatgaaaccggttcggcatggctgatacagttgctgttcgggcagaccagcacattgtcgatgcgctccggcagacttgggcgcgatttacccaccacttcatagttgtcgatacggttaaccgtggcttgcggcgcatacaatgccagttgatctacttgatcttcactcaaaaaggtattttcgattttgatcagatctttgcggcccatctcgccagaaggcaggttcagaccaatggtgatgcgctgatccgtttcggtcagcttgaacagactcaacagcttaaaaccgatctgggcggggatatggtcaattaccgtgccgcgtttaatagcttcaacctgcaatttattatcgtgtgtcatctctatttccccttacagtaccagatcgcgattcagaaccagtgccagtaacgcctggcgagcgaaaatcccgttgcctgcctgctggaagtaccaggcgtgtggcgttttatcaacatccgtcgcaatctcatcaacacgcggcagcggatgcagcactttcatattggctttggcgttgtggagatcgctggcgcgaagaacaaactgcgctttcacgttggcgtactcggacgggtccagacgctctttttgcacgcgggtcatgtacaggatgtctacttccgccatcacttcttcaatagagctgtgcagactccatgcgatccctttttcatcgagcatatccagaatgtattgcggcattgccagcgcgtccggcgcgatgaagtaaaaacggttgccgtcgaacttcgctaacgcctgagtcagggagtgaacggtgcggccatatttcaggtcaccaaccattgcgacgtggagattgtccagacgcccctgggtttcctgaatagtgaataagtccagcaaggtttgcgtcggatgttggttggagccatcaccggcattcagtaccggtacattgccggaaaactcggtggccaggcgcgccgcaccttcctgcggatgacgcatcactatcgcatcgacgtaagtgctgataaccgaaatggtatcggccagcgtttcgccctttttacccagtgatgtattggcgctgtcggagaagcccaccacgctggcccccaggcggtgcatagatgtttcgaaagagaggcgggtacgggtagaggcttcgaagaaacagctggcaatgactttgtgcttcaacagctctggttgcgggtttgctttcagtttcgccgctgtcgccagcaccagattaaggtcatcgcgactaaggtcgtttatggaaatgatatgtttctgatatagcggattagccatcttttatctcctgacgcctgggcaaaaaaaagcccctcgattgaggggctgggaatgggtgatcaacgggaagaaaaacggcaggccagcgtcttttttcagacgcggtaagacaaaatgtcgaacacactgaaccatacatcctcccggcaaattgtccggcattatactcatcgtcagaagcggcgcaagcatttgatgcaatattttgtcagcgcaaacggtttatttgaattaaaagtcaaggtatatgcatttttatttgatgtgattctgcaggggaactgtccttcggtatcaataattgcagacattccctgctttttcctttttcactttcacgcaatcagatatgcattttattccattcatccgacttatagggcggagtgtgaaagcgaacggctaacactattgcttactgctcagggatgcgcgctatcactttaatttcaaaatcaaagcctgccagccatgtaacacccaccgccgtccagtttggataaggtggggcgctaaatatttcatttttcaccgtcatgatgtcttcaaattggttttctggatcggtatggaagctcgtaacatcaatgatatcgtcaaaagtgcatcccgcagctgccagggtcgcatgcaaattatcaaatgccagtctgacttgttgctgaaaatcgggttctggtgttccgtcctctcgacttcctacttgcccggaaacaaacagcaaatcgccggaacgaatagccgcagaataacgatgctcagcatatagtgaatgtcggccagcagggaaaacagcggttctttctaccatttggttatcctcaagatttacgacatgaacagaagatttctctttaccgggagccgcttttagcggacgacgtgagtaaacaaaacccagacatcatggataatggctgggcttaattgagcgtagtcggttatgcgccaaacgcgccatcaatggtatgcatcgcgccggtaacaaaactggcttctggccctgctaaccatgcgaccataccagcgacctcttccggttgcccatgtcttttgatagccatcaaactatgcaacatatcgcgcattggcccgttggcgggattagcgtcggtatcaattggccctggctggacgacgttaatggtgatcccacgcggtccaaaatcacgggccagcccgcgcgccatgccttgcagggcagatttgctggcggcataagcagccatgcctgcaacaggcatacgatcgccattcacggagccgatgattaagatgcgcccgccttcgggcatctgccgggcggcttcaacagaggcatgataaggagcatgaatattgattttgaaaaggcgatcaatatcgtcggcatttaattccagggcctcgccaaagacgccaatacctgcatttaccaccaggatatccaatgcgccgctcttacgaacgacatcaatgacagcgtctctgtcagcactatctgtgaatactgctgtcgctccagtctcttgtgccaggcgtttagcggcatctttcgaccccgcataggtgaatcgtacattggccccatcggtgacgaaacgacgtacgatagcggcaccgataccacgactgccaccgaggatgagaactgtcttacctgtaaaagcgcccataaggactccttgatttattatgtaacatgcattacaaaactgttttaactttctgtcaacaggttttgtaatggtcactaaaaaacaatctcgcgttccaggtcgtcccagacgtttcgctcctgagcaggcaatctctgcggcaaaagtgctttttcaccaaaaaggtttcgatgctgtcagtgttgctgaagttactgattatcttggtattaaccccccgagcctctacgcggcttttggcagtaaagctgggttatttagccgtgtactcaatgaatacgtcggtacggaagctattccgcttgccgatattcttcgtgatgatcgtccggtaggcgagtgcctggttgaggtattaaaagaagcggcgcgcagatatagccaaaacggcggctgcgctggctgtatggttcttgaaggtattcatagtcatgatccacaagcgcgtgatattgccgttcaatattatcacgccgcagaaacgaccatttatgactacatcgccaggcggcatccacaacgcgcacaatgtgtgactgattttatgagtaccgtgatgtctgggctttctgcgaaggcacgagaggggcactctatagaacaactctgtgcaacagctgcaatggcgggggaagcgataaaaactattcttgaggagtgatgcgggccttgacccgaaaggcgggaaagcgcctgccgataagttgtgataagacaataattcacgcgttaaggctagcggaattgattatcttttcgtataacgatagaaatgaaacgttgttttaattaaggagtggaaaagatgatcatcggaaatattcataatcttcagccgtggctaccccaggagttacgccaggcgattgagcatatcaaagcacacgttacggcagaaacgccaaagggcaagcacgatatcgaaggcaatcgactgttttatcttatctcggaagatatgaccgagccgtacgaagctcgccgtgcggagtaccatgcccgctatcttgacattcagattgtgttaaaaggtcaggaaggcatgaccttcagcacgcaacctgcaggcgcgccggataccgactggttagctgataaagacatcgcatttttgccggaaggcgttgatgagaaaacagttattctaaatgaaggtgattttgttgtgttttatccgggggaagtgcataaaccgctgtgcgcagtgggcgcgccagcccaggttcgcaaagcagtagtgaagatgctgatggcgtgatgacttttcgccgtaaataactcaaggtttacggcgagtttgtgaaaagagcgttttttgatatttttttgtgagtaaaatttgtaatgcttagacgttcttattcactcaaggagttcgtcatgagcaaaatatcagatttaaattattctcaacacattacattagccgacaattttaaacaaaaaagtgaagttttaaatacctggcgtgttggaatgaatgattttgcccgtattgccggggggcaggataacagaaggaatattctttctcctggagcatttttagagtttttggcaaagatatttaccctgggttatgtggattttagcaaacgctccaacgaagcgggtagaaatatgatggctcatattaagtcctcatcttattctaaagatactaatggcaatgaaaaaatgaagttttacatgaataatcctgtaggggaacgagcggattcacccaaggtgattatagaaatttcactttccactatcactactatggggactcgtcaaggacatacagccattatatttccacaacctgatggttcgactaaccgttatgaagggaagtcctttgaaagaaaagatgagagttcattacacctgattactaacaaggttctggcgtgttaccaaagtgaagctaacaagaaaatagcgcgtctattaaataataatcaggagttaaataatctacagaaattaaataatctacagaagttaaataatctactgaagttaaataatatacaggggttaaataatcctcaggagttaaataatccgcagaatttaaatgattctcaggagttaaataactcgcaggaattaaatagtccacaggagttaaatgatccgcaggagttaaataattctcaggacttaaataactctaaggtgagttgtacagtttcagttgattctacgattacgggtttattaaaagaaccattgaataatgcattattagcaataaggaacgaacatctgctattaatgcctcatgtatgtgatgaatcgatttcatacttactgggcgaaaaaggtatacttgaagaaatagataagctctacgcattaaatgatcacggaattgataatgacaaagtaggtaacaatgaaattaatgacatcaaagttaacctgtctcatattcttattgattccttagatgatgcaaaggttaaccttacaccggtcatcgattcgattctggagactttttcaaaatccccatatattaatgatgtaagaatactggattggtgttttaataaaagcatgcaatattttgatgatactaaaaagataaagcatgcatgctccgtaataaatcatattaatcttcgcagcgatcagtctaaaatagctgagacattatttttcaatctcgataaagaaccctataaaaatagccctgaattacaggggttgatttggaataagttggttgtatatgtcaatgaatttaacttaagtaatcgagaaaaaacaaatttaatacaaaggctatttgataatgttgagtctatatttaatgaagtacctgtcagcattttagtgaatgatatttttatgaatgatttctttatgaaaaatcctgagatgattaattggtacttccctcagttacttaagagttatgagggtgaaaagatttattttgataatttaaaatatgatttaaatgataatgataaggaatctaataaagaaattttgaagaatcaaccagataatgttatcaaagaaaaactgaataatgaatacaaacttagatttagaatgatgcaaactatcttgcaatcgagagttaatgtattaccatatattaatgaacagcgtttaaataaactaaatccaccggaaaatttacgtatagcaatagaacactttgggtggaagaatagacctatcactgcataaataatgtgatgccgggatggtttccgcatcttatagcgatcagattatttactgagcgtcgcgaccatcaccgctttgatagtatgcatacggttttccgcctgatcaaaaacaatgctggcggcagattcgaagacctcatcagtgacttccataccgccatgtaggccaaattcttccgccattttcttgccaagcgtcgtttggtcgtcatgaaacgcgggcaggcagtggaggaatttgacctccgggttaccggtcaactgcatcatcttgctgttcacctgatattcacgcagcaatgcaatccgttccgcccatttctcttttgcttcccccatcgacacccacacatcggtatagataaagtcagcaccttcaactcccttcgcgacatcttcagtcagcgtaatattcccaccattttgctgtgccagggcgcggcattccgtaaccagcgcagcttccggccagcacgcttgtggcgcgaccagacgcaaatccagaccggtaagcgccgcagcttcgagcatcgaattgcccatgttgttacgcgcgtcacctgcatagaccagcgtcatttcgttgaacgctttgccgggcaaatgctcctgcatggtgagaagatccgccagcagctgcgtgggatggaactcattggtcaggccattccataccggcacgctagcgtattccgccagtgtttcgacaatctcctgaccatagccgcgatactgaataccgtcatacatgcgaccaagcacgcgggcagtgtctttaatcgactctttatgaccaatctggctgccgcttgggccgagataagtaacgcgagcaccctggtcatatgcggcaacttcgaaagagcatcgggtacgagtcgagtctttttcgaagatgagcgcgatgtttttaccagtgagtttggcttcttctttaccgcttttcttatcggctttcagcttcgcggctaactgcagcaggctgttgagttcagctggcgtgaaatcgagtaatttcaggaaatgcttatgataaaacccggacatagatccctcctgtggctaacgcctcaatgaattaaaattcaatttatatggatgattattcatttgcaagtctaaagcataaatctttgtcacaaaggtggaggcaatgtcagtggtgtgtgacaataagagtatcggcaggacattaagaggaatgagccatggcaaacccggaacaactggaagaacagcgtgaagaaacacgtttgattattgaagaattactggaagatggcagcgatccggacgcgctgtacaccatcgaacaccatctttccgcagacgatctggaaaccctggaaaaagcagcagttgaagcgtttaaactcggttacgaagtgaccgatccagaagagctggaagttgaagatggtgatatcgtgatttgctgcgacatcctcagcgagtgcgcgttgaatgccgatctgatcgatgcccaggttgaacaactgatgacgctggcagagaaatttgacgttgagtacgacggatggggcacttactttgaagatcctaacggcgaagatggcgacgatgaagattttgtcgatgaagacgatgacggagttcgccactaattaagcgtagcgcatcaggcccaggtagttcctgcaacctggtgaatttgtagcccggataaggcattcatgtcacatccggcataaacaaaacgtacgttgttaatgttcgaatgcccgcgagttgaacacgcgggcatttttttagagttcgcgcaacatccgcacttcacaatcgacatggcccgtgcagccaagcgcatagtcgatatgctcaaagcccaaatgctcataaagcgcaatggcttcctttaaaaaagcggtcgtttccagatagcagcgtttgaaacccatctctcgcgcctgctccatcgccattaaggccagtttttttgccagccctttgccgcggatagccggaagaaaatacatcttttgcagttcgcaaatatccgactcactcccggttaatggcgctatcccaccgccgccgaccacttcaccctcgtactcaacgacccaatatgcatggccaggctgactatatacttgatacagctcgtcaagattcggatcggcgacggtgtagcctttatcagcggtaagaccgtattcggcggatacctgacgaatgacgcgggcgatagcgaggattatcctgcagcgtcaggcgacgattacaggtgattgcggcgcaatgttattcatagtttaacccaataaaaataaagtaattatacatttgtttaataccactctcttcttacgtacgcaagcgacttataaagtaataaagtttttgccagcctattactgataagagtattgtaacgtggcagaacattttactgtctgtatatataagttatatcaatggattttttaatttcagggaatttttatggctcaagttattaatgaaatggatagttccgtcccattcgtttgtttttcatggtacaggtgagagatattttcttatttgtgtggtgaatgtgttgttaacgattataacgctaggtatctatttaccatgggcattaatgaaatgtaagcgttatctttatgctaatatggaagttaacggacaacgattttcttatggaattaccggtgggaatgtttttgttagttgtcttttttttgtttttttctatttcgcaatcttaatgacagtgtcagcagatatgccgcttgttggttgtgttttgactttgttactgttggttttgcttatatttatggcagcaaaaggactgcgtcatcaggccttaatgaccagtctcaacggcgtaagatttagttttaattgctctatgaaagggttctggtgggtgacctttttcttgccgattttaatggccattgggatggggactgttttctttatctcgacaaagatgctacctgccaatagttcaagtagtgttattatatccatggttctgatggcaatagttggtattgtttccattggtatttttaatggtactttatatagtctggtaatgagttttctctggagtaataccagtttcggtatacatcgtttcaaggtgaaattagatactacgtattgtataaaatatgccattctcgcatttttagctttattgccttttctcgctgttgctggttatattatcttcgatcaaatattaaatgcgtatgatagttctgtatatgcaaatgatgacattgagaatttacagcaatttatggaaatgcaacgtaaaatgataatcgcgcagttaatctattattttgggattgctgttagcacaagttatttaacggtgtctttgcgaaaccattttatgagcaacctgtcactgaatgatgggcgtattcgttttcgcttaactttaacgtaccacggtatgctttatcgcatgtgtgcgttggtggtgatatccgggattacgggcggtctggcttatccactgctgaaaatatggatgattgactggcaggcaaaaaatacgtatttgctgggcgatttggatgaccttcctttaatcaataaagaagaacaaccagataaaggcttcttagccagtatttcacggggagttatgccttctttaccatttctgtaagagataaaaaaaggccggatgcatgctccggccttgcgttttcatcactgtgttttgattacagcgcggcgataacagcctgctgttcaatcagtttcgctttcgcttccgcatagccttccagcttctcacgctctttcgcgatgaccgcttccggtgcgcgggcgacaaagccttcgttcgccagtttgttctcgatacggctgatttcaccttcaatcttcgccacttctttcgccagacgcgccagctcatcttctttgttgatgaggccagccatcgggatcagcagctctgcaccgtcgatgatcttcgtaacggaaaccggacctttgtcatcggcaggcagcacggtgatactttccagacgcgccagggtttgcaggaagccacggttttcatttacgcgacgttctgcatccgcgctgcaaccacgcagcagcagctccagcggtttgcccggcgcgatgttcatttctgcacggatgttacgtaccgcaacgatcgcctgtttcagccattcggtgtcggccagtgcggcttcatcaacctgagatgcatcgtactgcgggaacggctgcagcatgatggtgtcggcagtgataccgcaaagtactttcacacgctgccagatggtttcggtgatgaacggaatgatcggatgcgcgaggcgcagcagaccttccagtacagtcaccagcgtatggcgagtaccgcgcagttctgcttcggtgccaccgttcattaccggcttggtcagctcgagataccagtcacagaactggttccaggtgaactcatacagaatgcctgcggcgatatcgaagcggaagctgtccagcgcttcgcggtacgctttgatggtctggttgaactccgccagaatccagcggtccgccagcgacagcgtcatttcgccgccgttgaagccgcaatcctgaccttctgtgttcatcagcacaaagcggctggcgttccacagcttgttacagaagttacggtaaccttccagacgcttcatatcccagttgatgtcacgaccggtagacgccagcgccgccagggtgaagcgcagcgcgtcagtaccgtgcggctcaataccgttcgggaactgcttctcggtgcgcttacggattttgtccgccagctgcggctgcatcatattgccggtacgtttttccagcagttctggcagcgaaataccgtcaaccatatccagtgggtcgataacgttacccttggatttggacatcttctggccttcgtcatcacgaatcaggccggtcatgtaaacggtgtggaacggcacctgcggtttgccattttcatctttgatgaagtgcatggtcatcatgatcatgcgggcaatccagaagaaaatgatgtcgaaaccagataccatcacgctggttgggtggaactgacgcagggcgtcggtattttccggccagccaagggtagagaaggtccacagcgcagaagagaaccaggtatcgagaacgtcttcgtcctgacgcaggacaacatcagcaccgaggttattttctttacgcacttcgtcttcgttgcggccaacataaacgttacccgcttcgtcataccatgccgggatacggtgaccccaccacaactgacgagagatacaccagtcctgaatatcgcgcatccaggagaagtacatgttttcgtactgcttcggtacgaactgaatgtcgccgttctcaaccgcttcaaccgccggtttcgccaggacatcggcacgcacgtaccactggtcggtcagcattggttcgataactacgccgccacggtcgccgtaaggaacggtcaggtcgtgcggtttaatttcttccagcaggccaagcgcgtcaactgcggcaacgactgctttacgtgcagcaaaacgctccagtttctggaactctgcagggatttcgctggaataaacgtcagattcgttacctttggtatcgaacacctgggcgctttcacggatatcgccgtcaaaggtcaggatgttgatcatcggcagggcgtgacgtttacccacttcatagtcgttaaagtcgtgcgccggagtgattttcacgcagccggtgcctttttccatgtcggcgtgttcgtcgccaacgatcggaatacgacggttaaccagcggcagaatgacatatttgccaatcagatctttgtaacgcggatcttccgggttaacggctacgccagtatcgcccagcagggtttctggacgggtagtcgcgaccaccagataatctttaccgtctgcggttttcgcaccgtcagccagcggatagcggatgtgccacatcgaacctttcgattcgcggttttcgacttccaggtcagagatagcggtgcgcagtttcggatcccagtttaccaggcgtttgccacggtaaatcaggtcttctttatacagacgaacgaaaacttctttcaccgcattggacaggccttcgtccatggtgaagcgttcacgctcccagtcgacggagttgccgagacggcgcatctgacgggtaatggtgccgccagattccgctttccattcccagattttgtcgatgaaagcttcgcggccgtagtcgtgacgggttttaccttcttctgcggcaatcttgcgctcaacgaccatctgggtagcgatcccggcgtggtcagtaccgacctgccacagggtgtttttgccctgcatgcgctgatagcggatcatggtatccatgatggtttgctggaaggcgtgacccatatgcaaactgccggtgacgttcggcggcgggatcatgatgcagaaactttcctggctttcatcgccattaggcttaaagtagccctgcttttcccagtgctcgtaaagcggctgttcgatatcttgtgggttatatgtcttttccattatttccaggttgccgtattcaggttgaaaccagccacgcggtaggctttatagcgttcgcgcgccagttgtttcagagaatcttcataaggaacgaagtctaccacttctgtgaaagcggtggcaaaatctgcaaagcttgttcgcagactaatcaatatatcgcgccggctgctgctacgcttttgcggccaggcgatctccaccggtgcaccgccgcgcggtccttctcccgctaaattatgcggaacaaagctttctgccggacgcgcccacagggcttcatccagccggtaagcctgcttttcatcttcacaggcgatgagcacgcgcttaccgctgcgccaacgttctgcggcaatttcacacaccagttgctcaacggcgcttaagccatcgacggtggtgtcattgtccagaaggtagaacgtcgcgtttttcataaatggggcttcttgtggtggatttaaatacgcatcaggtatacaccgcagcgcctgatgcgacgctgttgtgtcttatcaggcctacgagttcagtgctgtgtaggtcggataaggcgttcacgccgcatccggcaataacagccttgcctgacgcaattactcttcgccgttaaacccagcgcggtttaacaggaactgtgccagcaacgctaccggacgaccggtggcgccttttgctttaccagaacgccaggcggtaccggcgatatccaggtgcgcccagttgtacttacgggtaaagcgtgacaggaagcaacctgcggtaatcgccccaccaggacgaccgccaatgttcgccatatcggcaaaattggactccagttgttcctgatactcgtcacccagcggtaagcgccatgcgcggtcaccggattgttcagacgcggcaatcagttcatgggccagcggattatggttcgccatcagaccagtaatatgatgacccagcgcgatcacgcaggcaccggtcagcgtcgccacgtcaatcaccgcttccggctcaaaacgctcaacgtaagttaacacgtcgcacagtaccaggcggccttcagcgtcggtgttcagcacttcaacggtttgaccggacatggtggttaacacatcgcccggacgataggctcgtccgccaggcatgttttcgcagcctgccaacacgccgataacgttaatcggcagttgtagctccgcgaccatccgcatcacgccgtaaaccgctgccgcaccgcacatatcgtacttcatctcatccatgccttctgaaggcttgatcgagataccgccggagtcgaaggttaaacctttacccaccagcacgattgggcgtgcatcttccgacgcgttgcctttgtactcaatcaccgacatcagcgattcgttttgcgaaccctgaccgaccgccagataggaatgcatccccagctctttcatctgctgttcgccgataacgcgggtgatgacattcttgctgtagctgtcagccagctggcgcgcttgtgaagcgaggtaagcggcgttacagatattcggcggcatattgccgagatcttttgctgctttaatcccggcggcaatcgccagaccgtgctggatcgcgcgctcaccgctggtcagttcacggcgggtcggcacgttgaacaccatcttacgcagcggacgacgcggttcgctcttgttcgttttcagctgatcgaaactgtagagcgtctcttttgccgtctcgacagcctgacgcactttccagtagttgttacggcctttaacgtgcagctcagtcagaaagcagaccgcttccattgagccagtatcattcagcgtattaatggttttctgaataacctgcttgtactgacgctcatccagctcacgttctttgccgcaaccaataaggagaattcgctcggaaagtacattcggaacatggtgcagcaacaatgtctgccccggttttccttccagttcgccccgacgtagcagggcgctgatgtacccatcgctgattttatcgagctgttctgcaatcggagaaaggcgacgtggttcgaagacgcccacgacgatgcaggcactccgctgtttctccgggctaccgctttttacactaaactccatgcactacgctcctgaatcttaaagacaacggcggtggctacagatagaattgcaagctttcgtaactcatgtccgctgttgcgatgacttcgtgttaatcttaacgttattacggcattggcacgtcagaacaaaatctgagaggtgaatccgttgagtataattatcttagcgacgatttcgacgactcaagagaataaatgacgtttaagccatgaaacaagctaaaatcctgcaaaagacgagtttttacgggcgtatttaaagtgataatcataagatatctggtgcgggagacgctcaaaagccagctggcgatactcttcatcttgcttttgatcttcttctgtcaaaagttagtgaggatcctcggcgcagcggttgacggcgatattccggcgaatctggtgctctcccttctcgggttgggcgtgccggaaatggcgcagcttatcctgccattaagcctgttcctcgggctgctgatgacgctgggcaaactgtataccgaaagtgaaattacggtaatgcatgcctgcggcctgagcaaagcggttctggtgaaagcggcaatgatccttgcggtattcacggcaatcgtagcggcggttaacgtgatgtgggcgggaccgtggtcatcgcgtcatcaggatgaagtgttagcagaagcgaaagcgaaccctggcatggcggcgctggcgcaagggcaattccagcaagcgactaatggcagctcggtgctgttcatcgaaagcgttgacggcagcgatttcaaagatgtgttcctcgcgcaaattcgaccaaaaggtaatgcacgtccttctgtggtggtggccgattccggacatttaacccagctgcgcgacggctcccaggtcgtcactctcaaccagggaacgcgcttcgaaggcactgcattgttacgtgatttccgcattacggacttccaggattatcaggcgatcattggtcaccaggcggtggcgctcgacccgaacgataccgaccagatggacatgcgcacattgtggaacactgacaccgatcgtgctcgcgcagaactgaactggcgtatcacgttggtattcaccgtgtttatgatggcacttatggtcgtaccgctgagcgtggttaacccacgtcagggacgcgtactgtcgatgctgccagccatgctgctgtatctacttttcttcctgatccagacctccctgaaatcgaacggcggtaaaggtaagctggacccgacgctgtggatgtggaccgttaacctgatttatctggctttagcgattgttctcaacctttgggacaccgtgccggtccgccgcctgcgcgccagtttttcgcgtaaaggagcggtgtgatgcaaccttttggcgtacttgaccgctatatcggtaaaactattttcaccaccatcatgatgacactgttcatgctggtgtcgctgtcgggcattatcaagtttgtcgatcagctgaaaaaagccgggcaggggagttacgacgcgttaggcgcaggaatgtataccttgctgagcgtgccgaaagatgtgcagatcttcttcccgatggcggctctgcttggggcgttgcttggtcttgggatgctggcgcagcgcagcgaactggtggtgatgcaggcttctggttttacccgtatgcaggtggcgctgtcggtgatgaaaaccgccattccgctggtcttgctgacgatggcgattggcgaatgggtcgcgccgcagggcgagcagatggcgcgtaactaccgtgcgcaggcgatgtacggcggctcgttgctctctacccagcaaggcttatgggcgaaagatggcaacaacttcgtctacattgagcgggttaaaggtgacgaagagttaggtggcatcagcatttatgcctttaacgagaatcgtcgtctgcaatccgtacgctatgccgctactgcgaagtttgacccggaacataaagtctggcgtctgtcgcaggttgatgaatctgatctgaccaatccgaaacagattaccggttcgcagacggtgagcggcacctggaaaaccaacctcacgccggacaaactgggcgtggtggcgctggacccggatgcactctctatcagcggtttgcacaactatgtgaagtatctgaagtcgagcggtcaggatgccggacgttatcagctcaacatgtggagcaaaatcttccagccgctatctgtggcggtgatgatgctgatggcgctgtcgttcatctttggcccactgcgtagcgtaccgatgggcgtgcgtgtggtcaccggtatcagtttcggttttgtcttctacgtactggaccagatcttcggcccgctgacgttggtttatggcatcccgccgatcatcggcgcactgttgccaagcgccagcttcttcttaatcagcctgtggctgttaatgagaaaatcgtaaccgaatgaacgaataaagggagcgaaagctccctttattattgttagcaaagtgtgcttcgttcattcctgaaaaataattaaaattcaatatattgcagtggggtgggcatgataagacgcgccagcgtcgcatcaggcaaagacaaatctcgcctgacttaccttcttctcccccccagcaaactccccaacatcccgcgtacaatctgattcgtcacttggcgagcggcgcttttggccattgtttgcaccacaccatctttcttcccgccgcgtggtccggtagtgccgaacaaaatatccttcaatccaccaagaatgccgtcatccaccgctacctctttccctttcgcgggaggattattttgctgctcggtactggcctgaaagcctttttgcaacatctcataggcggattcccggtccacctcatcctcatatttgccatacaccggagagtgattaatcaagccattacgctcatcttccgtcaccggccccatccgcgaacaaggcgcgatcaccatcgcacgctccaccacagaagggcttcctttcgcatccagaaaagagatcaacgcctcgccggtgcccagttcctgaatcgccttttcggtatcaaacgccggattggcccgcatggtttgcgccgctgccttcactgctttctgatcttttggcgtaaaagcccgcaaagcatgttgaacgcgattaccgagctgcccgagcacattatccggaatatcagacgggttttgcgaaacgaaccagacgcccacgccttttgagcgaataagccttatcacctgctcaatcttatccagcagtacctgcggggcatcgttaaacagcagatgtgcctcgtcgaagaaaaacaccagttttggtttctccagatcgcccgcttccggcaattgttcatacaactctgaaagcatccacagcaggctggcggcgtacagtttcggcatctgataaagtttctcggcgctgaggatattgataacgcctttaccgttggcatcggtgcgcatccagtctttgatatccagcatcggctcaccaaagaagtgtgctgcgccttgctgttccagcgacaacagcccgcgctggatggcaccaaccgatgcgctactgatattaccgtactgattctggaaggatttggcgttatcgccgatgtactgggtaattgcccgcagatctttaaagtcgagcagtaacagcccctgatcgtcagcaatgcggaagatgatattcagcacgccagattgcacatcgttgagattcaacagtcgtgccagcaacagcggccccagatccgaaaccgtcgcccgcaccggatggcctttctcgccaaagatatcccacaccaccaccggattggcatgcggttgccagtcattgacgccgatatttttaagccttgcgagcagtttttccgacaccgttcctgcctgcgcgacgccggtcagatcgcctttcacatcagccataaacaccggcacgccgatttccgacaatgactccgccagtttttgcagcgtaacggttttacccgtccccgttgcgccggtaatcagcccatgacggttagccattcccggcagtaaaaacagttctgtgtccggcgtgcgggcaattaacaggggttcactcatgagatatcctccagtttcctgcctggagtataggcaacgtccggcaaagagaatacgtgtaatgaagagaaaataacctaaagcgtgttgccgtgataaatctgatacccgaggtcaacagtgttgtggttgtgatcgttatttttaattttgctcagcaacatttgggcggccatccgaccaatatcaaaacggggagtaattacgctggcgaggcttgggatcatttgcctgccaatctccagcccatgaaaacccgcaatggaaatttgttctggcacggcgaggtttcgctcgcggcacagcagaagcgcacccatcgcaatatcgtcattggtgcaaaatacaccgtctaaatccgggtttgcgctaagggcatcacgcattaactgcattcctaaatgaatggatgagatggcgcgtggattcatgcgtaatggggaaagattatgcagcatcatcgcatcgcaatacccctgataacgctgttcatcgcgggtgtcatctttggaaccgagatacagaattttgtgcctgactcgcttctccagcatggtacacaccatgtcaaaagcggcctgccgattatcaaaaccgacctccatatccagccgttctccctgtacatccatcaattccacgaccggaatggtggctgaacgcagaaatttcaccgtcctgatggtgtgatatttttccgaaagtataatcccgtcaatgttataagagagcaggttaatcaccgactcttcttcggaatcgcgatcgtaattgtaattagcaataagggtctgataattatgctcagaggtgacggattctattcccgcgagaatgtcagcgaagagttgattttgaaatgacggaatcaagataccgagggtataactttgtgcattcaacaacatgccgggagcgcgattagggatataattgatctcttccataattttggcgatgcgctcgcctgtttcctttgccacctttttcggcgagcggatataacgactcacggtcatttttgttacgccagccagcgtagcgatatcctgtaaagaaattctgtgattgcgcataacttctcccaacgtcgggggaatcttcaatcttcccccgaaactacatcacaatattttattctttcagtgcaatacggcgttaatggctaacacgcccagcaaacccataatagaaataagggtttccatcaccgtccaggtacgcaacgtttcaccaaccgtcagattaaaataccctttaaatagccagaagccagggtcgtttacgtgtgacgcgatcacgctgcccgcaccggttgccagtaccattaaagcgggatcggcatgggtaacgttgataatcggcaacaccacacccgcggtggtaatggccgcgacggtggcagagcccagagcgatacgcaacagcgccgcaacagtccagcacatcaataacggcgaaagtgtagttccggtcattaagtgtgaaatatagtgcccgacaccgctatctactaatacctgcttaaacgcgccgccgccagcgataataaacacaatcatcgcgatagcgcctatagaatccccaatgatatccatgatttgctcgatggtgcgtccattacgtcggcccagtgtgaaaatcgcaataacaatggcaataaacagcgcaacggcagggttaccgacaaattcaaagaagaggcgcacggtgttagttttcggtaacgtaatttcacaaacggcggcgatagccatcaggatgaccgggatcacggcagcgaaaatactgttccagaaggagggcatctcctcttcgctaaacagatgaggattaaataagccttccggtggtgctttctcaaagcgagttagcagtttagaaaacagcggtcctgcgacaataactgtcggaatggtaatgataaatccatacagtaaagtcgttccgagattagcctcaaagatagtcgcgatggcagtaggccctggatgtggcggcagaaaacagtgggttacagagagcgctgctaccattggtacgccaacatacaacaggggtaatcctgatgatgctacgatggtaaataccaacggcaacagcaggacaaaacccacttcaaaaaacatggcgaggcccacaaccagaccggtgatcactagcgcccattgcacgcgttttttaccaaaagtagcaatcagcgtagtggcgatacgttgtgccgcacccgtatcagaaatcagcttgcctaacatggccccgaaaccgaggatcattgccagcccgccgagcgtgctgccgataccattttgtatagagtgcaggacggcctgtgcatccatcccttcggcaaatccgacgacggcagctaccagaacgagggcaataaagccgttaactttaaagccgatcatcaggataagaagcagcgcgacgcctgccgcaataatgattaatggcatagtctttatctcttattagtgccagaaaagcagcgctttcgcgctgcacgtaggggggctgttaaacagccactaacatgccgccatcaacaaacaacaggtggccgtttacgaaatcagaggcttttgaagaaaggaacaccgcagcaccaatcagttcctgcggatctccccagcgtgcggcgggggtccgtttgcacaaccaggcggtgaaggcttcgtcctcaaccagtgctttagtcatttctgttttgaaatagcccggcgcaataccgttgacctgaatattgtggcgcgccagctcgacgcacatgccgcgggtgagcatttttaccgcccctttcgatgcggcataaggggtgatggtgtcacgtcccagttcgctttgcatcgagcaaatattaataactttacctgccttgcgttcaaccatgtgacgagttaccgcttgcgataccaggaacacggcggtctggtttactgcgatcacatcattccactcttgttcagggaactcagtaaaaggatgacggcgctggataccggcgttattcaccagcacatcaatggggccgatgtccttttcgatatgttcaacggcggcatcaatttcatgtttatgagtaacattaaaaggtgcggcaacggcctgaataccctcctggtggagtttttctacagcaagttctgcgcgttcggcagtaatatcattaataattatttgtgcgccatatttacccaggccggttgccagtaaaaagccaatgccctgtgctgaaccggtaatcaagatattttttcctgccagtgaaaatagatcgttcattgtattattcctttatttatctcttagaaaacaagctggacttttgctgcctgggttttatcaccggcgaaacgtagcgcctcttccaggtcagtgaagggatattcagcactcagtaaaggcagtggattgataacgccattcgccagccatgacactgcggtattaaattcgctggtaaaacggaaagagcctctgagtgaaatctccttaccaatcaacgtcatcattgggaattctgccatcgcgcctcccatacctacctgcaccattacgccgcgtgcacgagtgacctccagacaggtattcactgatgaaggatgaccggacacttcaaagctgacatcgaaatagcctttttccgctttccagtgatccatgtcgtcgttttgtgggtttacgagcacatccgcccccatctctttgcccagcgaaagggaacggggactcacatcagcacagacaatttccgcggcccccagtgttttcactgcactgacaatcaggcagccaatgggtccaacaccggaaataaatactcgcttgccctgtaactcgccggcctgatgtgcggcatgaatcgcgacggctaaaggttcggcaaaagccataaccttttcgtcagctttggccggataagggacacattgcgacgtttcgaccattttataacgggtaaaaccaccatcaacatgagggaaatacatggcactgccaaaaaaacgcatatctgtacactgattctcgttatgttcaatgcagtatttgcagtgaccgcacggtttagacggattaatggctaccgtttgcccttcatgtaattctgatgagtcgctatgaataactttaccgataacttcatgacctaacaccatcggtgcctttatcatgaaattacctacttttccttcctgataataatgtaaatcggaaccgcaaattccacctcgggttatttgtactaatgttccattattattccaatctatcgtctgctcggtaacggcaacagttttcttgcccgcaacaacgcaggactgtgttttcacttgcataaattcctcactggtcaggtagacacctcggaagcatttaagcggttttaactgtcattatttgtgatgaagatcacgtcagaaaattgttacattactatgttacgcataacgtgatgtgccttgtaattcttatcagtagaaataaaaaaacgtgaaattattatgccgccaggcgtagtatcgcagcaggtaagatgattcaggagattttaaatggcgggtgaaagctttattttgatgggcgtttcagggagtggtaaaacattaattggtagcaaggttgccgcgttattatctgctaaatttattgatggtgacgatcttcatccagccaaaaatatagataaaatgtcgcagggtattccattatctgatgaagatcgacttccctggctggaacgcttaaatgatgcttcatacagtctttataaaaagaatgaaacaggatttattgtctgttcatcattaaaaaaacagtatcgtgatattttacgcaagggtagcccccatgttcatttcctctggttagatggcgactatgaaactattctcgcgcgaatgcagcgtcgggctgggcattttatgccggtagcgttactaaaaagtcagtttgaggcactggagcgtccacaagcagatgaacaggatattgtgcgcattgatatcaaccatgatattgccaatgtcaccgaacaatgtcggcaggctgtgctggcgatacgacaaaacagaatatgtgcgaaagagggcagcgcctcagatcagcgctgcgaatgattttcaaaaatcggctttcaacaccacgcggtaacgcgccttaccgtcgcgcacatgctggatggcgtcgttaattttcgacatcgggaacagttcggtggtcggcgcaaccttgctgcgggcggcaaaacgcatcagcttacgcagctcataaggcgtgccggtagcagaaccagagacgctgcgatcgcccgcaattaacgtaaaggccggaacagacagcggcgtgagaaccgcaccgaccgtatggaaattaccgccataggtcagcgcctcaaaatagggctgccagtcgaggctgacgttgacggtgttgataatgagatcaaactgccccgccagtgctttcagtgcctgcggatcgcggctattcaccactttatcggcacccatcgccagcacttcctgctctttcgccggattagaactaaaggctgtcacctcgcatcccattgcgtgcagaagttttatagcgatatgccccagcccgccaataccaattaccccaacgcggctggtagcagtgatatggtgcatcaacagtggtttaaagaccgtgataccgccgcacaacagcggcccggcggactcgatatcaatattttctggcagtggaatcacccattgccagtccgcacgcaacttctcggcaaagccaccgcgattcataatcgtcggcaccgcaccttgctcgcagttgatctgattaccgctaatacaggcgtcgcagtgaccacagctacgcgccgtccagccaatcccgacacgctgaccgacctgcaaacctttatcctgcgcggcgctcccgagtgccaccacgcgcccaatcacctcatgcccggcaaccagcggatattgtgaaaatccccattcgttatcgatcatcgacagatcggaatggcagatcccgcagtaatccacctgcacttcaacatcttgtggcctcagctcaccgggatcgtactcataaacttccagttcgccgcccgcttcttttgcggcatagctttttatcatcgacattttttggtccttctctggtgttgtttgggaagtgtagagcatggcagggcggggtgcctggagtgtgacaaaggttacacatcgctgtatgcaatgctgaaaatttcagcacttagcgaggtgcgagcaagctggcgcttgcatggtggcgtgcgacaggtataatccacaacgttttccgcatacctcttcagtgccgaagtggcgaaatcggtagacgcagttgattcaaaatcaaccgtagaaatacgtgccggttcgagtccggccttcggcaccaaaagtatgtaaatagacctcaactgaggtctttttttatgcctgaaatccagtgtttatctatctttcccgctatattaactctctcaaggtcaaccgatatcaacgtacatctaccaacatatgttggtacagatgatggtatttccggttcgataatgcttgtaccaacagggagggaatacgatggcattaacagatatcaaagtcagagcagccaagccaacggataagcaatattagctgactgatggtggcggtatgcatctgcttgtccatccaaatggttctaagtactggcgtttgcagtaccgttatgagggaaagcaaaaaatgctggcacttggggtttatcctgaaatcacactagcggatgccagagtacgtcgtgacgaggcgcgtaagctgcttgcgaatggcgtcgatccgggagacaaaaagaaaaatgataaggttgaacagagtaaagcacgaacctttaaagaagtcgcgattgagtggcatggcaccaataaaaagtggtctgaagatcacgcccatcgtgtgctaaaaagtcttgaagataatctttttgcagcgcttggtgaacgtaatatcgctgagttaaaaactcgagatttattagcacctattaaggccgtagaaatgtctggacgtcttgaagtggccgctcgtcttcagcagcgcactacagccatcatgcgctatgcagtgcaaagtgggttaattgattataacccggcacaagagatggctggggcggttgcttcctgtaatcgacaacatcgtcccgcgcttgaattaaagcgcatccctgagttgcttacaaaaatagatagctatactggtaggccgctaacccgatgggcgatagaactcactttgctgatctttattcggtccagtgagctgcgttttgctcgttggtcagagatcgatttcgaagcgtctatatggactatcccaccggagcgggagcctattcctggagtgaaacattcccatagaggctcaaaaatgcgtacaacgcatctagtgcctctttcaacgcaagctcttgcaattttaaagcagataaaacagttttatggggcccatgacttgatatttattggtgatcacgattcgcacaaacccatgagtgagaatacggtaaatagtgcgttacgggtcatggggtatgatacaaaagtagaggtttgtggtcatggctttcgaacaatggcctgtagttcattggtcgaatcaggtctgtggtctcgtgatgctgttgaacgtcagatgagccacatggcgcgaaattcagtgagggccgcgtatatccataaagcagagcatctggaagaacggcgattgatgctacagtggtgggccgattttctggatgtaaacagagaaaggtttatcagtccatttgaatatgcaaagattaataatccattaaaacagtaatcatcccgggcaaatgcccgggaattattctaggattattttctttgttaaaaaagacaaacggtattaactgatgtatttactatttaccgctccctgcaggggggattatcagaatccgcggttattcattatttatatacattcaataaaaaagtaacctcataaaaaatcctgtactcacagggtgatgcgggataactgacgtaaggagtgctgcagggatttgatggtcccttgtagactggccccctgaatctccagacaaccaatatcacttaaataagtgatagtcttaatactagtttttagactagtcattggagaacagatgattgatgtcttagggccggagaaacgcagacggcgtaccacacaggaaaagatcgcaattgttcagcagagctttgaaccggggatgacggtctccctcgttgcccggcaacatggtgtagcagccagccagttatttctctggcgtaagcaataccaggaaggaagtcttactgctgtcgccgccggagaacaggttgttcctgcctctgaacttgctgccgccatgaagcagattaaagaactccagcgcctgctcggcaagaaaacgatggaaaatgaactcctcaaagaagccgttgaatatggacgggcaaaaaagtggatagcgcacgcgcccttattgcccggggatggggagtaagcttagtcagccgttgtctccgggtgtcgcgtgcgcagttgcacgtcattctcagacgaaccgatgactggatggatggccgccgcagtcgtcacactgatgatacggatgtgcttctccgtatacaccatgttatcggagagctgccaacgtatggttatcgtcgggtatgggcgctgcttcgcagacaggcagaacttgatggtatgcctgcgatcaatgccaaacgtgtttaccggatcatgcgccagaatgcgctgttgcttgagcgaaaacctgctgtaccgccatcgaaacgggcacatacaggcagagtggccgtgaaagaaagcaatcagcgatggtgctctgacgggttcgagttctgctgtgataacggagagagactgcgtgtcacgttcgcgctggactgctgtgatcgtgaggcactgcactgggcggtcactaccggcggcttcaacagtgaaacagtacaggacgtcatgctgggagcggtggaacgccgcttcggcaacgatcttccgtcgtctccagtggagtggctgacggataatggttcatgctaccgggctaatgaaacacgccagttcgcccggatgttgggacttgaaccgaagaacacggcggtgcggagtccggagagtaacggaatagcagagagcttcgtgaaaacgataaagcgtgactacatcagtatcatgcccaaaccagacgggttaacggcagcaaagaaccttgcagaggcgttcgagcattataacgaatggcatccgcatagtgcgctgggttatcgctcgccacgggaatatctgcggcagcgggcttgtaatgggttaagtgataacagatgtctggaaatataggggcaaatccaccttgtgctgatatgaatacggatattttatacagaatacttttcagtacaagcgactgtattacagtctgccatatatgattacctgtgatcaggaagaataagtggctgaggtttcaaactgtctgccggtatattcctctctcccttaaaaaccataacaggttagttatcttcgtctgtcagcggattgaatggcggtatattttcagtacaaataccggtcatccactgaaaaatacctgcgaaatgacgggcactgatttttctactgacgggctgatgagacgttatgtcactggcggtaataatcagtggcacactgtagcctccctgcacatgaccataatgatgaacaggattggcactgtcgctgaccgacagcccaaggccagaaaagtaaagcatggcgaaatgacgtgagtaccggcgaaggataccatcaagctggccaagaaagttatccagtttactgatgctggcgaggtaacaggcaatttttcggggatactgctccaggtaattattcggctaggagttaaggctgtcacacggatttggatgagaacccatcatgtgcaggaaaattatcttcggagaggatgtatccgccagcgcacgttctgtttcctgtaacaacagtttgtcatctgttttacgggaagcgaagctgcctttcttgaggaaagtggcatgctccgcatcagaagcaataacagagatgcgtgtgtcatgctcccccagttttccttgattggatatccaccatgtgctgtatcctgcttttgctgccagcgccaccacattgttgccggaatcagggttctgctcatagtcataaatcagtgtccggctcagggaagacactgtactggaggctgtcgaggtataatcgtcaataaataaaccgggtgccgtattcagccacggtgtggttggtacgggatagtcatacactgacatataatccctgcgcacactctcaccagtgacaataacaatcgtatcatataacggtgctcccggctggattttccagttgtcagccccgtgctactcagttgttcataacgctgcatttcacgtaatgtgtcagttgtccccacaactgttcctttaaccatccgcaatggccaacggtttacagagcataatacgaatagccgtagagccagccagttacggtggtcgcgatggtgtgtccgccagaaaatcaccacgaataccagaatcgcggcactgaccagaaaatgataaacaggaaacacggggcggttcactttgctttctcctgtagtgttttctgtaggttctgaaccggttctagcggggttgtgaggctgatggcaatcgccgggctcttcctgcatgttacactggtactgcaagagggggccttcgctcctctgacattactcagtattttcactactacaccccatctgccatccataacaaccgattcaccccctcgcgaggcgttgttgcccgtcacccggacagacaccgttatggacttctcttgttgcacgatcgatcaattgttatgcatgctgacaccacaaccccggtgggtatgaccgatgcctttctcactctcttcccggtcatcgtcggccttccccgttattgtggcgtgtcagcaccctcgacggcatttcgatggctgctcagtgttcactcacgttacggcccgcataacccgttgacttcctgaagaagtcgtttcagggagagattcagcccttttgttacctcctggaccgcttcttgtccttccagtcggagcgagagttagccggggcggactttcaccgacggaaagatcgtgcatttcaaggcacacacaacaatatctgcgagcgtgctatccgtccggtcgttatgggacgaaaggcctggttgttcgctggttcactggtggccgggaaccgcgcggcacagataatgagccttctgggaaccgcagtctggagccacatgcttggctgacggacgtcctgacgcgtctgccggagtggccggaggagaggttggctgagttactgcctcttgagggctttaccttcttcgggtaagtgatacctgccgtcaggtgtttgtgcaccgggccataacctgcagttgggaattgaacgcctgacaacaggaaatgagctagagcagtaaacacgcgggctgacaatgggtcagaatatgagttagcccggcgttattcctggggtcagtacttcagatctagcctccggtaccagactagctagcccctacgcaaccaaataaatcaaccatcgtcagagtgcaatcgttcatatacactgtcggtgatgcgctaaaaaatgcgttaatgttgagttcctcgaacccttaccaattaagggacatagccagatacgcaactggctgatgcaagcagtctaatgtctttagatccgctggcctgcgggcatgacaatgtcaaacagtcaaagattgtggcgttgacggtcagtcttggggacaaaaaagctcagtattctcgttggcaaccagataatttaacagttgatgctgaaacgaaataggcatcttggttctgtaatgccagtcagttaagcaactgactggctctttttcggggctgtggggtatttccagggcctctcctttaccactctcgggaaggccctttcccttcttgtcggtaatttcacaagttgtcccatacttgcaagatcgcgcatcagctccggtatacgtcccggtgaagcgccctgcaatgtcatcagcattctcatcaccattccgcatgattctgagaaactcagttgattcggccagtaacctttcagatgttccgccattttaatcatctgatatctcaccagattataagccagtaagacaccccacagctcttgctccacaagctccggctttttacttctcagcgtcagcctgctccgttgcatcgtctgttttatctccctgtatcccagttcgatttcccagcgatgactgtacagatcccccatttctcctccggggaagcgcatggcgtccgtcatcgacgtcagcagatggcagacttttcctttgcgcgtcacggtcagcaggcgggcagtcacttcatttcccagtcccggccacttttttcgtgcctgcgggctggttttcagcttcaccagatgatcgcctttacccagttttctgatctcttcatattgcgctccctttctgagaggtatcatccagtggcggtgttctcccgccaggctccaggcatttaacagtcccagtgagtaataacctttatccattaacgtcagagtgttatcgccggtttgttctataagttgctcagcaagctcattttcgctgttcttcatcgtgccgaaggctgcagccgtcagcagatggctggtcagttccatctggcagaccattttgacctgcgggtagagcgccgggttcccggcatgtgtctggcgggggaaggctgcatcgttctctggtgtatccggtgtgcgccagaacacaccatcgatggccagcagggtcaggccgcaccagtgcggatgcggcgtggcgttatgccagagctgcgctgttttcgtgaacacgcggcggacagcctcacttcccaggcgctggcgggcctgaataacggcactgggggcaacgaaggggcgattgcccggcagcatgatgtccaggcgattcacaatctggtgaagaggttctttacgctcaagcgccatgccaacaatacaccagaccatcatttcgaggggaagacggcgcttgcgtagcgttacagtacctgattcggcaaggcaacgagagatgagttcggggtcgaggtaatcccccagagaagtcagtgggttacgcagagaatcgtaacgggataccagatcaagagcctgtccaatgtgcataaaaaaatccggaaacaagtgagcgtttccggattcttacacagccactggatcggtcaactgatccttaactgatcggcattaatcttggttctggtgtttgtaacaaactatcagctacaaaaatatgctcaatttgtgacatcagtaacaaaacgcgttttgttatgtggattgcttgttttttgatctggtataacaggtataaaggtatacagaaaagcaaagaaatactgcaaaggaaaacagctataacgtaagctaaagtaataacctctcagtctttcctcatttgacgaagggagttttattcaacctgaacggactacgaaaatgagcacaatgaataagtcaatttttgaagcagggttgaactgtgccagtggtggaatatctggcgaacattgttttttgttggtgacccaaaactgtaggtgggtatcagttttatctttcatagagtgaaatatgttaagaagaaatggaggaaaagattgtactgattaggtattgataacaatcaatagtactggcgtatttgaagacaatataattatttctggatattgttgaggctccctaatatttactttaagggctatattagaataacacaggaaacaaatatggcaacagcatggtataaacaagttaatccaccacaacggaaagctcttttttccgcatggcttggatatgtatttgatggctttgattttatgatgatattttacattcttcatattataaaagcagatcttggcattacggatattcaggctactttaatagggacagtggccttcatagccagacctattggaggtggtttttttggtgccatggctgataaatatggtcgtaagccaatgatgatgtgggcaattttcatttactcagtcggaacaggccttagcggtattgctacaaacttatatatgctcgcagtttgccgttttattgttggcttagggatgtctggtgaatatgcatgtgcttcaacttatgcggtagaaagttggcctaaaaatcttcaatctaaagctagtgcttttttggtaagtggtttttctgttggaaatattattgcggcacaaataatccctcagtttgctgaagtatatggatggagaaactctttttttataggcctgttaccagttttactagttctttggatcagaaaaagtgctccagaaagtcaggagtggattgaagataaatataaggataaatcaacatttttgtctgtcttcagaaaaccacatctttcaatctctatgatcgttttcctcgtctgtttttgtctatttggtgcaaactggccgataaacggactacttccttcctacctggcagataatggagttaatacagtggtcatttcaactctgatgacaatagcaggtttaggaacactgacaggtacaatattttttggttttgttggtgataagattggtgtaaaaaaagcctttgtagtcggtctaataacttcatttattttcctttgtcctcttttttttatttctgtgaaaaactcttctcttataggattatgtctctttggattaatgtttacaaatttaggtattgcagggttggttccaaaatttatatatgattactttccaacaaaattaagaggattagggaccggtcttatttataacttaggggcaactggaggaatggccgcacctgtattagctacatacatttcaggatattatggcttaggtgtttcattattcattgttacggttgcattctctgccttattaattttgttagttggttttgatattccaggtaaaatttataaactatccgtggctaaatgattggaggctttatgattaattatggcgttgttggtgttggatactttggcgctgaattagctcgttttatgaatatgcatgataatgcaaaaattacatgtgtatacgatcctgaaaatggagaaaatattgcccgtgaattgcagtgtatcaatatgtcaagcttggatgctttagtctcaagtaaattagtcgattgcgtgatcgtagccaccccaaattatctgcataaagaaccagtaattaaagcagcaaagaataagaagcatgttttttgtgaaaaaccaattgcattaagttatgaagattgtgtggatatggtcaaagcgtgtaaagaagctggtgtgacctttatggccgggcatattatgaattttttcaatggggttcaatatgcacggaagttaattaaagaaggtgttatcggcgaaatattatcatgtcatactaagagaaatggctgggaaaacaaacaagagagactttcctggaaaaagatgaaagaacaatctggtggacatctatatcatcatatacatgagttagattgtgttcagcatttacttggagaaataccagagacggttactatgattggtggaaatttggcccattctggtccaggatttggcaatgaagatgatatgttatttatgaccttggaattcccgtcaggaaaactagcaaccttagagtgggggagtgcatttaactggccggaacattatgtcatcatcaatggaactaaaggctctattaaaattgatatgcaagaaacagcagggtcacttaggattggcggtcagacaaagcattttttggtccatgaaacacaagaagaagatgatgatcgtcggaaaggcaatatgacctcagaaatggatggcgctatagcatatggtcatccaggaaaaaaaacaccattatggcttgccagtttaataagaaaggagacgttattcctccataatatcctctgtggtgcaaaacctgaagaagattatattgaccttctcaatggtgaggcggccatgtcggcgattgctactgctgatgctgccactctttcaagatcgcaggacaggaaagtgaaaatcagtgagatcattaaacatacatcagtaatgtaaaaactatacgcctcttgatttaattcaggaggccttttatgtatgatcaagaattttatcttcgataatctcataattttagcagtgccatttatgataaaaacatcccttaaaaccaatctaatctttttcttcctctgtgtatttgttccccatatggcgtcataatttacgctacgtaatacgggatagttacgatacgcagcgatagcgctaagttttagttaaaatcccccatcagcgggatatggggatctctgggaggttcaggttttagcatcgcgactttaatacgacagacgctggtgacgatgatgccaagtagtgactcttccgaataaggttcccactgaccaattggcgcgcgcttcgcaataaaatctcccttcgcccagtattgggaaaagtagatacattcaaactgtgtacgctgtttcgtctcacagttcacgacattgctggccgatgagctgaccattgggcctatccgggctgtcccgatggatattacgccgaagtatgtgggaattgccagcggattgatgaacgccggttccgctgtcgccgacattatttcacctatcgcctttggcattattatcgacaaaacaggcaactggagtttaccattctacggttccgtcgcattgcttgttattggtatattcctgacgttcttcatgcgtccagataagtcattgtaaaagtcgaatcagggctgaagtggcacactgaatttggccacctgaacagaggtgatatgctcacctcagaacaacacaggtgctccaatgaaaaaaagaaatttcagcgcagagtttaaacgcgaatccgctcaactggttgttgaccagaaatacacggtggcagatgccgcgaaagctatggatgttggcctttccacaatgacaagatgggtcaaacaactgcgtgatgagcgtcagggcaaaacaccaaaagcctctccgataacaccagaacaaatcgaaatacgtaagctgaggaaaaagctacaacggattgaaatggagaatgaaatattaaaaaggctactgtagattcaatctgtcaatgcaacacccctttcaattatctctttcggtgttttgaacttcagtgtctttctcggtctgttgtttagctgagcagcaaccagatctagttcatgttgagtatattgggcaagacatgtctttttaggaaagtactgccgaattagcccatttgtgttctcatttgttccccgctgccaaggactctgaggatcgcagaagtaaactttaacgccggtgctgacagtaaattctagatgtctggccagttccattcctctgtcccatgtcagtgattttctgagttctgacggtaaactcaggaatttgtcggtaagagcctgatttactgagacagaatctttgcccctgagtctaaggatgatcgtataacgtgattttcggtctacaagtgtggctatatgagagttttttgtacctgagactaaatcgccctcccaatgccctagagagcgtctgttatcgatatttcgggaacgttcgtgaattggtgttccgttcactatgttaatcgtacctctttcgcctttgcgggtatgacgcctgccatggcgaaggctatgcgaccgtcgcagatgctgtatattcaggtggtgtagcgcttcacggctacgaaagtacagcgttttataaattgtctcaggtgatattcgcagcgttttttgacgtggttttgttcgccttaaccatcctgatatttgctctggagaccatttcatctccagcttttccagaacaagctttcgcaatggtaaattttgatccagtaagcacggttttggccttttcgccattctgttggctcggttattagcatcaacagctttgtaatagcgtctgccccgattacgctgaacttcacgtgagatcgtcgaaggactgcgattcagcgcagtagctatcgcacgaatgctcattttggctgacaaaccagctcgtatctcctcgcgctcagacagtgtcaggtgagctacagcccgcttacgctcatggggttttatgccgccagtatcccttaacatagtgaagatcgttccgggttttgaacccaggatattcgctatttcactgaagcctgttccgttcttccatagttcaaaaacagaggctttttcctctgctgtaaatgttcgtctcattcaaaaaacctccgcaaccccatgttttcacataactgttgcgttgaccaattgaatctacagttgctttttttaatatatctcgctcaaggcgagcttcatttaacgccttacgcagttgcagaatttcagattccagttcagccaccgtgcgggaaccaggagtaccgagcccttttctggcggcggtaacccattgtcctaaagtgccttcaggaagagataatcgggaagcgccttcactgatcgaaagttgattttcaagaaccgttctgacagcttcggctttgaactttttagagtaacgttgggtttttctgctcattattagctccttctgatgccattctatttcaggaaggagtgtccgttaaactcaggctacctcaggaaaaaccgtcctgaaaaaccagacggcagacgggctgtattacgcagtcaggtacttgagctacatggcatcagccacggttcggccggagcaagaagcatcgccacaatggcaacccggagaggctaccagatgggacgctggcttgctggcaggctcatgaaagagctggggctggtcagctgtcagcagccgactcaccggtataaacgtggtggtcatgaacatgttgctatccctaactaccttgaaaggcagttcgccgtgaccgagccaaatcaggtgtggtgcggtgatgtgacctatatctggacgggtaagcgctgggcgtacctcgccgttgttctcgacctgttcgcaagaaaaccagtgggctgggccatgtcgttctcgccggacagcaggcttaccatgaaagcactggaaatggcatgggaaacccgtggtaagcccgtcggggtgatgttccaagcgatcaaggcagtcattatacgagcaggcagttccggcagttactgtggcgataccggatcaggcagagtatgagtcggcgtggaaactgctgggataacagcccaatggagcgcttcttcaggagtctgaagaacgaatgggtgccagcgacgggctatgtaagcttcagcgatgcagctcacgcaataacggactatatcgttggatattacagcgcactaagaccgcacgaatataatggtgggttaccaccaaacgaatcagaaaaccgatactggaaaaactctaacgcggaggccagttttagttgaccacaacagactacctgaagggagccgcggtcgcctggcagttgcagtagcaggagatcatccagccgcagtacaggtcacgatgactctggttaatgataccggctttgaccccgtattttccggctctatcgctgaatcatggcgtcagcagccgtgcacaccatcctattgttgtgactgggaggctgccaccatgcttcgcgctttccctctggcgaaaaagggagaaggacgggcccgtctgccttcactttatgccagcttcggtaagctgggtgagacaccgactcatgaagatatcattgataacaatcgatccatcaactggcctgtataacgtggctgccggtgattaagaaagctgcacctacctaagtagtagcaaacgcacactttttagaaaaatcgatggtcagaaactggattagcaattccgttccatggttgcttttgatttacgttggcgtctgatcattgatttatcctcaaaagcccaacctcattggtaatgaaccagctccgtgaatgtccgctctggcacagagcgaaattttttgatctcccccctgaaatctaaacttagtcatgtcacgtttttgggtttctaaaattttaacttcgcgtttttcgttgccgtaagggttatacagaaatgtccgttaagcagagttcaaaattgattgccgtgatcacgactggtttgaaagccgcgcccaagcctgtacagctctggtttgcgttgattatgaacctgtcagcctaaagcaagcggatggacgatgagtattggtaatctttcagagtccggaaaagttcagccccagtctgaacaggcttgctggcgccagtccagtttcattcagtcgtggtttggttcttacggcctgtgcaatctacctcattaggcacatcggcctgccagataccggctcggggtgtatttccgcttccacgctgaatactgttctcagcaatcctggggtcatcacctcttctggtgtgccttgcgccataacatgtccgtttgccattaccaccagttgatcgcagtaccggctagcctgattaaggtcgtgcagcacagcgaccaccgttttcccctgagtccggagttcgcccatcaaccgcatcaggtccacctggtgattgatatcaagataggtggttggctcatcaagtaatacaacgggcgtattctgggccaggaccattgccagaaatgcgcgctggcgctgaccgccggaaagctcggttaaccgacgaacggcaagatgattgatccgggtctggttcatggcgacattaactcgtgcattgtcttcagcggagagacgcccccagagtgacagccagggattacgaccatacgaaaccagctcctggactgtgatcccctctggcgttaaatggtgctgaggcagcagcgaaagcctgcgggccaactggcgcgatgagagcatatttatgggattatcgccgagaaatacggtgccagactgcggcattaaaagccgcgaaaaacagtttaacagcgtcgatttcccgcaaccgttaggaccgatcagggcggtgatcttccccgttggcagtgagagtgaaacgtcgttaagtaccttgtctgtcccgtaactgaccgtcagattttcagttcgtaaagtcatttatcgcattctcacaagcaaccagacaaaccacggcgcaccgataatggcggtcagcacgccaaccgggagctccagtgggggatgaataattctcgccagcagatcggcaaccaccaacagcaacgcacctgtcagggccgaaacaggcagcagtctgcggtgacgtccaccggtgatgctacgcatcatatgcggcaccacgagaccaataaagctaatcgggccgcaggcggccacgccggtagatgtcatggcgacagctagtaacaaagcccagaatcgggtatggggcaccgacacaccgagcgtggtggcgcgcgcatcgccgagtgcaaggaggtcgagatcgcggcaaaaactcaggctcagcggcagaaataaaatcatcagcgggatggcaatcttcacaaagctccagtcacggccccataagctgccggtcagccacagcagggcgttgttcacatcctgcgggcgcgagagcatcagataatccgtcaggctggcccagcatgcagaaagcgccacgccggtgagcgccagcttcatcggctggtgggtctttgccagcatcttcagcaatatcaaccccgccatgccgcccgcaaaggccagcagcggcagcaccatcacgggcagtgacggcataagaagtagagcccccacagaggccaggctggcggcatggttaacaccgagaatatccggtgatgccagagggttgcgcacaatcccctgtatcagcacgcccgccacggcgagggctgcaccgacaaacagtgccagcagcaagcgcggcagtcggtactccatcaatacataataatgctcgtgtccggcctgccagtcggtcagcagcgcgcgccacggcacggggatcactcccatatggagtgataacagcgcacagcccgccagggcaagggtgatgaaaataaccagcgcaattttcatcctcgcctcctcacaagccagacaaagcaagggctgccaatcagcgccagcactgcgcctgcgggcagatctccggggaaggccagcgcgcgtgcgagtacatctgccagcagcatcagcgtggcccccagcagcatgctcactggcagtacgttgcgctgatcgaagcctgcccagaagcgcgccagatgtggcaccagcagaccgataaacgccaccggacctgctacgctgacgcacgcaccaaccagaagcagcactaacatattgatgaccaaacgtagcctcgtcaggttcactcccagcgtatgggcggtgctgtcgctgaggttgagcaggttcagttgattcgccagcagcaacacgacagggactgcagtgaccaccaccggcaagagctgccagacatcctgccagcgggcgtgggacactccgcctgccagccagtaaaagatgccgtaagcatgatcttcggccagcagcagggtgatgcgggtaaggcccatacaaaaggccgacagcgcgatacccgcgaggatcagtttgtttctgtcatgggtatgacgaaatccgcctcctgcggtcatgaccagcagccagctcacgccgcccccgcatgccgcgatgaatgacagagaatagcctgcaatcggcgtcggactcagcgcgctggtaagcgccatagccagcgccgcgccgctgttaatgccgagcagtgaaggagaggccattgggttgtgggtcagggtttgcagcagcgtgcccgcgagcgccaggcttgcgccgatcagaacggcgaccaggcttcgtggcaaacgaaggttttgcaccagcgcttctggtagcgttggcgtgtgtccaggcagcagggcgcgggttgcatctgctccggaaacaggaatggccgagtagcaaaacagactcagccagaaaataataataagtgctgcaacgggaagcccccacagcagcaccgggtgttttatcgcggtcatttcacaacggtaagcggctgatggtggaagatttttaccgtgtcagcggcaatacgctctgcagcaaaaataccgcgcatccgcgcccaggtgttactgtcgaccgaagcaacctgctgcttctgcgcggcggttaacatctgccagagcggatcttgttgccagcgtttaacaatgctctcttcgcgatagtgggcaaccagcagccaggcaggattgaccgccagcagttgctccaggccgatggacggcatggacgcacccgccatcgcagcgggaacgttcagccccagagaggccagcacgctgccggtccaggtctcctgagtatgcaggttgaattgctgttcgcgtgatgtgccaaaggccacgcgtgtccctttgggaagctggctggcccactgcgccatcctctctttatgttgttccagacgtgcctgcatctctcgctttttacccaccatttcgccgatgatagccgcagattgcaaattttcagcgtaggtttcgttgcgggacttaagcagcagtaccggcgcgatttgctgcaaggcgatgtaaacccccgcatggcgactgctgtcggcaatgatcaggtctggtttcagagcggcaatggcttccaggctcggctgcgcgcgcgttccgacggactgccacggtttcaggtgcgcacgcacttcgggcaggatgcgttttgcatcgttatcgtcggcaataccgatcgggatgacgtccacggcggccagcgcatcggcgaacgagagttccagcaccacaatccgttgtggcgttttttcgagtgtaaacgtgccgtgttcgtcctgaaccgtggcggcaaaggcgtggctgatcaccagcagcaggcctgcaaaaagaaaacggataaatgccaacataatcacattccagctaaaagcccggcaagccgggcgttaacacatcagaacttcaacgacccctgcatatacagcgtgcgcggctggcctgcatagatgcctttgttgttgtcgtcataagagcggatgaagtagtcctggtcgaagatgtttttcacaccgaatgccaggttcagatctgccatctgcgggccaaagtcatacgccacgcgtgcgccccagagcatgaagccgggaatgcggccggtactgccgtcggcgctctctttcaccgtattggcgttatccgcaaactggctggactggaaatcgctgttcagattgaacgtccagtttcctggcttgtagtccacgcccagcgtgcctttatgtttcggggagaatggtaccagattgccgtaggtgtcgcctttctcgcggatttccgcgttcacatacgcatagctggcgtagatggaaacgttatcaagcgttggcgttagcgtacccagatcgtaacgtgcctgcgtttccagcccggtatggcgcgttttgccacgtgcagtgacggtgtcgttggtctggttggagtcgtactgattgttaaagttaatcaggaacagccccatttccgccgtcagcgcgccgtcgtcgtagcgggtaccgagttcccaggttcgcgctttttccggttcaacattgccgctttgcacagccttgccaatctggctgtactgtacggtgccgaacgagccttcagtgtttgcataaagattccagctgtcagtcaggtgatagagcacgttcaacgccggaagcggtgcgttatagctcacttcttcgtgcgtgcctgtgatggcgttgttctggtatgactcgatatgttcgaaacgcatacccggcgtgatggtccagttgccgatgtcgattttgtcatccagataccaggcgtgcgcctcggtgccggaacgcgtatcgcggtcgtaagggcttgagccggacggcaactgcccgctgctggtggcggtgtagtaacgcatttcatgcgttgattcattcaaatagcgatagcccacgcccacttcgtgcgcggaagggccgatcataaagatctggctgtagcgtggctcaataccgcgcacccagtagttacgcggcgagagggtgatgcgtttgccttgctccaggtagccgctgcgcagggtttgggtgtagaacccctgaatgttgaatttatgctggctgtctggctggaactggtagcccaggctcgccagcttgcgacgaccccagaagcggtcatacgggcgggtggattgccagcgatcggcgtcgtaatccgcgcgagacaggccaccgggcatgtcggcttcaccgtcgtaatattgcagcaggctgttgaaggtgtgcacctcatccggcgcatatttgcttttcagcatcaggtcgtcgatgcgggtggcgctgtgctcgcgccagtcactgccgcgcgtgccggagtagagcagcgcggtgccaaaaccgttgtccgctgtgccgcccaccatcaggttgtgcgtctctttcgggttgttttgtgaagaggttgggctgagctgaccttccacgcccgcctcgataccaaagtcctgcggaatggcacgggtaacaaagttcaccacgccgcccacgctctgcggtccgtaacgcaccgcaccaccaccgcgtaccacgtcaatggcatccatgttgccgagcgaaacgggagccagtgaaagctgcggctgaccgtaaggggcgaaggggacggggatgccgtccatcaggacggtcgagcggctggcgaggcgcgggttcaggccccggatgccaaagttcatcgccaggtcgtggctgccggtgccgttgttttccggcgcgctgacgccagggatgcggttaagtacctcacgcatggtggttgcgccggttttggcgaaatcctcacggcggatcacgtcacgcgcgccagcatgttcaaatacgtcgttttcacgcgcatcacccagccagtcgccgaccacggtcagggcatcttcttttggtgcgggcgcgggctccagcgtccagctgttatttcccagcggttttacctgcagtccgctgccgtccagcagttgttgcaggccgctctcgacgtcgtaatcgccgtgcaggccgttgctctgcttgccgcgcgtcaggctggcgtcaaccgagagggtaaatccgctgtgtgcggcatactgattgagcgctttatcgagcgatcccggtgcgatattaacctgtgcagcaaaagcggaaaacgagagaccggccagcggcagcaggctcaggcgaatggtgttaaccaaaggtgttgttttacgaaaaacgcgtaacggcgtcataccttccccatcatcatttttgttgtgttcagctatgagtcgaacgagaagggtaaaaaggacaatcgaaataagaattattttccttacagtggtgaaatgtttatccagtaccgcgtaatagactgaattttaacgggaagcgtttgcgcgataacgttcaggatcgcatcggtatttttcagcgggaacgtcccgctcaggcgcagcccggcaacggcgggatcgcagcgcagcacgccgttgcggtaacgggttagcgtggctatcacctcacccagcggtttatcgctgaagctcaggatgtccttcgtccagcttgtactctcgtcatccagcggtttcactgcgccaaactcagaggcgctgaactgcaggctttcaccagcgttcacgatgcgtttttgcgcgggggcactggcgagaagcacttccacagcgtgctgctgcacgtcaagctgcgtgaaattatcctgctggcggacggtaaattctgtccctaaagcagtgagctggccctgacgggtcaggacacggaaggggcgttgcagggcatctttcgcggtagtaatggcgatttcaccgtaccagagccggacggtgcgctgatgcgcatcaaaacgcacatccgccgcgctttgggtattcagcgtgagcagggagccatcttccagttgctgacggctgactgtgcctttggcggtgcggtaatctgcccgcagaccttcgccggtttccgactgccagagctgccagcctccgccagcgccgagcaacagcagtaatcctttcatcacgtgacggcgggtgaggcgggtatcgtgcaacgcccggctggcaacgtcgccaggcacaccgccaagctggttgcgcaggttttcaacctgctgccaggcccactggttatcctgatcctgttcataccactgttgccagcgcgcttcctgttgtgggctgacgcgctcgccgcttagcacggcataccagtgggaagctgaacgcagcgcctgacggcgggaatcggttaacaaaggattcataacccatactccagacggaacagcaggcagtgctcgacggctttcgccacgtattttttcacggagctgatggaaacaccgagtttgtgcgcaatctcgctgtatgtcagaccatccagttgcgaaagcagaaacgcttcacgtgttttgccgtttagcccgtccagcatgctgtcgaggagttgtagggtctcgagttggctttcgcgttcctcaggtgaaggcgctcccccctccggcataagcgccagcatctccagatacgctttttccagcgcgtttcggcgaaacaggtccaccatcacgcgtttggcgatagtgcagaggaaggagcgaggatcgcggatcgtcgagagcgtttcgctgaccattacccgcaaaaaagtgtcctgggcaatgtcatctgcatcaaaagcagactggagtttgcgcgtcagccagcttttcaaccagccgtgatgtgtgccataaagcgactcgaacgttaaggaagctgtggtagtggcgcggtcagacatgcggagtgcatcaaaagttaattatcacgtagtcatattaatatgagaatggttatcattacaattggaaataaaattgtttccaatagacatttttaacatgttgtttttctaagtgttataaggtaggtataaaatgggatggagcctctgcttctggcatgtgtcggtcagaatgactcatgatgtggtctgctattattgacatcctcactgccctaaaggatggggatttcggtaatgctgccaacttactgatttagtgtatgatggtgattttaaggtgcttgcgtggcttccatttccatcagatgtccttcctgctccgctactgaaggcgtggtgcgtaacggcaaaagcactgccggacatcagcgctatctctgctctccttgccgtaaaacatggcaactacagttcacttacaccgcctctcagcccggtaagcaccagaaaatcattgatatggccatgaatggcgtcggatgtcgcgccagtgcacgcattatgggcgttggcctcaacacggttttacgtcacttaaaaaactcaggccgcagtcggtaacctcgcgcatacaaccgggcagtgatgtgattgtctgcgctgaaatggacgaacagtggggctacgtcggtgctaaatcacgtcagcgctggctgttttacgcgtatgacaggatacggaggacggttgtggcgcacgtcttcggtgaacgcactctggccacactggagcgtcttctgagcctgctgtcggcctttgaggtcgtggtatagatgacggatggctggccgctgtatgaatcacgcctgaagggaaagctgcacgttatcagcaagcgttacactcagcgcattgagcgacataatctgaatctgagacaacatctggcaaggctgggacggaagttactgtcgttctcaaaatcggtggagttgcatgacaaggtcatcgggcattatctgaacataaaacactatcagtaagttggagtcattaccgaccatgtttatttcatacattgtgggtattgttcttattatcgccgctaatcaataaaatcctgccccatatctacatggggcagttgttcattcttttagtgtggtaattcacacgccagcaaaaactctgccgttccttcatcaacaatcaggtccgtgacatatcctcccagcagggcacccaacgttgcgtcatagcctctttccccaccagcaaggaagatcttccgttcaatctgccttagctgagccagactgattcccagaatacgctggtcaacatcagccacgacgggcatcccttccttgtcatagaagcgaccacaaatgacacctactgcgcctaaatcccgatacgtctgcatttccttcttattcagcacgcccacccgaatcaggggattttcatcaagcgcgttacccacgacaaaaaaggctttcgtacagcgagtcagaacgtcaaaattcgatcgaataataggctctgcctgtaactccatggccagtctggcgcttgataccacggcgggcacgtgcagcgaggcgacacggcctgaaagcttgtaggcgatttgcgatgaggattcaatgatcgtcaggtctggctgagatggcatggaaccgagcatctgtataacggtgacatttttacatgacttcggcgtcatggttttgctcatctgatggattgttcttccccaggcaacccccagcacatcaccattctcaatcacctgattcagatacatgccaccggcacgtgaaaggcgagtccgcatcagctttgtatcatcacgttttccggcatgttcgccatccggcacgatgatcactctctggagattgaatttatcgcgaatttgcaaagcagcgtcgatagagccaaagacattcacatccaggttgatatgaaccagtccattttcccgggctgtttgcaggtatttgacaaccgtgacgcgggacacccccatgatagctgcaacttcagtctggcttttgccttcctgatagtacagccatgttgcatgaagtacgggatcatcattgaacaggctgctgtttgtttgatctctatccacttttgtatacctgtattaaaccggggaaatgctcatcttaaccctgtttacccggagagttgatgcagattgccagtggcatgattttatacagatattttattcttttacatgaaataaaccagcataccatttgagcgatcgcccgctgttcccccatactgtaaagccggagacatgctccggctttacagtattactgagaatacacccatcaagcataatcgaaggttcaatatcgcccctttttgatcgccagcgattcgtcaccgtgcagacggttgccgtcactcactaaattatgggggacagtgaacaacaggttggctcactggcaagaacccgattataaaactaagctggcgagcagaataaaaatcagcccactgatggataagagtgtggacatcagcgtccaggataacagcgtttctttggtggtcaggccaaaaaagtctttaatcatccagaaactggcatcgttaacgtgagaacaaatacaggatccggcaccggtagccagcgtaatcaaggccaggttggtattgggatgtactgccaacaatgggatgaccagaccggcggtagagatcgccgcgacggtggctgaacccagacaaatacgcaggaatgcggccacgccccaggccatcaggatcgggttaatatccatacccgaaaccagggtggaaatatactgaccaacgccagagtcgatgagaacttgcttgaatgcaccaccaccaccgataatcagcagcagaccggcaatacccgcgatagcttttccgcaagaatccatcaggtcagggattgttttcccgcgccccaggcccatggtatagatcgcgaatagcagtgaaatcagcatggcgatcgttgaattacctaagaacagtatcacgttgtaaaataagcctgaatccgcggcacttttggcatgagtcatctggatgatggtgacaaccgccatcaggatcaccggcagcattgccgtgagaaaactgatcccaaagcctggcatttcgctttcgctgaatcggcgggtcgcgccgagagaggctatattcccctcttttttaaaggcgtccggaataatgcgctggcagaatttattcaataccgggccgcaaagaataaaggttggaatgccgacaatgataccgtatatcagtaccaatcctacatcagcgccatattccctggcgataacagtcgggccggggtgcggcggcaaaaaaccgtgtgcgaccagcaaaccagaaagcatcggcacacacataaacatcggtgatatttttgcttcacgggcaatagcgaataaaataggtaccagaagaattaaaccgacttcgaaaaaaagtgcgataccgacaataaacgccgaacagaccactgcccagtcaagtttatttttcccgaaataattcagcatggtcagcgctattcgctgcgcaccacccgcatcggccagcaagcgaccgagcataacaccgaagccaaatatcaaaccaatatggcccagcgtaccgccaagtccggattcgactgaggtgacgactttactcaaatccataccactggcgatggcgacagcaatcgagacaataattaacgaaacaaacgtattaagcttaatttttatggttaaaagcaggagtaaagcaatccctgccacaacgataattagtggcataacgtcctctcataacagggtagcgacccatcattatccgactgagcaaataacgaatgatgcagagtcggataattcaggtgtctggatgtttttatttatgctttcagtttttattcataaaatcgcgcaaagccgcgccaattttgtttacatcataaatacaaccggtccatgtcccaccactcacggcctgaagcattgcccatagccgggtatcatctggcaattcaggatcgggaagtaaatcctgatggctgggtctggcatttaatattgcagttgcctcctcctgtgaaggtaattgttcatcgctacgggttccgaggaaattgacttcgccgtgaagctcgcgacaatcaattttaatttcaattaaatccccggtgcgtaatttaccgatggggcctccggccagcgcttctggccccacatggccgatgcacgcgccagtagaaacgcccgagaaacgtgcatcggtgattaacgaaacatgcttaccgtatgacagatgcttcagggcactggtaacctggtaggtttcttccatccctgtacctgaaggtccaacgccaataatgaccagaatatcgcccgccttgatcttgtcatgtttgatatcgtaaatcgcacttttctcggacagataaaccttcgccacacctttatggtaatagataccttgctcatcaatcatcgaggggtcaatggcggtggatttgatcaccgaaccttctggcgcaatattgcccaccgggaaggtgatagttgaggttaatccgcgcgcttttgcttgctgcggagacatgatcacttcgtcagcgttgatttgttcctgatcgagcaggagttgcttgaaccgctgacgccgttcggagtgctcccaccagtcgaggttttctttcagcgtgctgccggtaaccgtcataacgtcttcatgcaacaatccgaggctgcgcagatgcaacatgacttccggcacaccacctgccataaaggcattgaccgttggatgataaaccgggccattaggcagtacgctcaccagtcggggcacgcgcttgttgatgcggatccagtcatcaacggtcgggatatggcaacctgcctggtgagcaattgccgggatgtgtaacagcaggtttgttgaaccaccgaacgcggcatggaccgtcatcgcattctctatcgctttatcggtgagaatttcccgggtggtgatgcctttttgactcaggttcagcgcagctcgcgcggaagctctggcgatctcccgccacacaggctcaccggaaggggccagggctgaatgtgggattgccagtcccaatccttcggccaccacctgagatgtcccggcagtgcccaaaaattgacagccgccgccggaagaggcacaggctttacagcccgcacggcgtgcgtcctgtagagataattcgccattggcgaagcgtgcgccaatggtttgcaccttgccgttgtcttctccatcctttgcgggcagcgtcgcgccgccggggaccagcacggttgcgatgttgtgctgcgcggcgagtgccatcatggtggccggaagccccttatcgcaactcgccacaccaataactgctttcgcgtcgggcagagagcgaataaggcggcgcattaccatcgatgcgtcatttcggtatggtagcgaatcaaacatccccgttgtaccctgagtacgcccgtcacaaggatcggagacgtacacggcatagggcagggcatggttggctttaataacctcggccgccgctttcatctggatgtccagttcgtaatgcccctggtgcaacgccagcgccacgggtttaccgtctgcgccgcgtaagccaccgagtgtactgagcagtaaaataccgtcccgatccagctcgtccggagaccaacccattccggcattcatggtcataccgaacagatccccgctcgggcggttgataagcatctctgcggttaatgggagttcgccgtccgggccatcggcgtgcgttctgacggtgtaaatatcgtggctctcgtcagcaaaaatattgcgaacagacatgagtttctcctcagactggtaaaatgccctgcgcggtaagcagcacgtggactttatcttttgcttcttcagatgcttcaagaatcggtggtaagcaatatgtctctacaggcagcccgacacactgcatgctgtatttgatcagtgagacaaacggtgtttcgagggcgtaaatagcgggcagttgtagtagttttttattcagcgtcgcagcggtcgccagatcgccttcacgccaggcgcggtagatgccgacggagagttccggagcaaagttagcgctggcggttatcgcaccgtcgccgcccagcagcatcgtattcagcaaatgatcatcgtaaccgcagaataccgaaaacgacgggcgtaccgacttaactgtgttgatcatcgtacgcaagtgaccaacgctgtcgatggtgtctttgatgccaacgatattctcgttttgcagagccagacgcgtcacggtttccggggttaagtcctgacccgtcagatccggaaagttgtacaggatcaccggtagggtgacgctacgggcgatctgctggtaatagtcgtcaagatttcgtggtgcgactttccagtagtaggggttgatggcgacgataccatcagcgccgtaggcttgcgcatgctgcgccagtttgaccgcttcgtcagtggaaggggaaccgacgccaatcaataccggcactcgcccgtcgacaatggttacagcttcttcggcgagtgccatgcgctgggctgtattcatttggctaaattcaccaccggtacccagataaaacagcccgtcgacccctttattaatcaggaagtcggcaacttcgcgcattgcctttttatcaagggttccgtcacgatgaaacgtgctggataccggtggaataatgccgctgaattttttcattacctcagtttccttttcgtaagtgctcattttcgtttctgtatcccagcccatatgatatttgctcagcgcatttccggagcaattccagatagctgtctatcttatttcctgaataaactaccggatcgccagaaagtgagattgcatagttaactctgttatacatattgaataccggcatacttaaacataccgccccataggttgattcttcgttgtctatggcccatccccgaaggcgtgttttttgtaattcttccagaaacaattttttatcggtaaatgtattgcgcgtatgtggagttaacgtgagtgcttctaaaaaataatccagttcttctcgtgtcttccaggctaataatgccttacccaacgcggtaatatgcaactcaagttttttgccaatccagcttttgctcgtcggtacagagtccggactttcgatcttgtcgagatagatagccgaaatgctctccatcgccccaagatgacaaaccagtccacttttcagcgacaactcctgcattggccgcttagtcacctcaaatatattttgacggtgtaacgcctgacaacccaattcgtagttttttattcccagtgaatagtagccgtttttgtttttaattaagaaaccacaatccaccattacattcaataaattaagcaggctgcttttggggtactggaatttatttaataactccatataacttgccataccaacccatgcaatgtgggttaatattttttcagcacggactaatgaattacaccctttgcgaaccataatggctcctccttgctcatggaataaatggtatcggcattacatagtggaaaatatgctttgttcagcatgctgaaccgtaatgatgtgattaaatgtgatcttgtacacactttgaataatgaatccagaacagccacatttagtgaatgagaataaaaagtagatggcgtgttgttgcaacatcgtagtgtgtggattgcgcctagagcttctttattcgttcgagcgcatcgccaatattttctattgggtgccattgattatttttgcttgaaatccctctcgaatgaacttacttatcactttattgaatgaggtaaaaacaactgacatccggctcgctgataacgctgtgcaatagtctcaggtaacccgctgtcactgatgatcgttttaatacatgatagtgttgctacagcatgcggctcaacggcatcaaattttgagtgatcggccatgagaataacttcacgcgagcgttgaataatccgtgttttcaccccgacctcaaacatggtggcattggtgatccccgtctccagcgacagcgcatcgcaggagataaacgcacgttctacggaaaaggcattgatcatctccagcgccagactctctcctaccgaaaaataacctgggcgaatcagtcctccgataatgtaactttccacatggggaaaacagcccagttcattggcgattttaatgtcgttgcagatgacctttacccgcgcatcggccaggcatttcgccagttcgaggcaggttgagccggagtcgagaaaaaagcagtcgccatctttgatcattgttcgggcaagggcagctatttctcttttcgccacagattgcaatgtacgtttcacgtcgaagacgtactctttgtcgtctgtactgtcgtcgaagtccaggcaaccgtgaccgcggatcatgcctggatactggttgacaatatactggaaatcacgacggacagtcgcttccgcatagccaaaaagctccatggcctgctgtgtggagaggtgacgatgttgccacaggtagtgcagcatctgtttgatacggtcaggtctctgttggctcatcagaaacaatctcctcttacagggtggcgaattgagctaaggtcgcgcgatagtcagatgaagagaacagggcgcgcccaatcaccatatgttgcgccccagctgctgccagttgctgtgcagctgccagcgtaattccaccgtcggcccagcactcggtctgaggaaaagccgtgcgtactttttggattttctcgcacatggagggaataaaccgctgtccctgcccatcgggctcactggtcatcaccatcactccgtccagctcagacgccagatatcgccaggcgtcgatcggggttgccggattaaataccagtccggctcgtgcgccggtatggcggatctcagttaacgtttccgaaggatagtccagcgtttctgcatgaacgaagatccacgcgggtctgatttcagccagcgcgttaaaccagcgctgtggccgggcaagcatgaaatgaaaggacaagggatgaggcgtctgtctggcgacggcctgcaccgttttcatcccaaacgtaatgttgttaatgaagctgctgtcctcaatatccagatgcaggctcccaaaatccagattgtccaatgccgtcagctcacgaccatagtgcagaggatttgcgctggcgagagaagggtgcaggatcataagcgcctccgttaacctgataccagcgcaaacagtgcatcgtctgtgctggcatttcccactgccgttaagcgttgtggcgaatcaataaactggctgatgcgctgaatggtcaaaatatgtgcgttggcatccgtggcgctgacgcagagaagcagccagacggggtcgcactcctcgttaccaaaggcgaccggggtgcgtagcgtggtgatactgacctgattatagtttgcgccttgctctggtcgggcgtgaggcaaggcgattcctggggctatcagataataaggcccccagttaagggtattttcgatgatcccattaacgtagcatggctgcgcggcaccataggctaccagcgggcgggtggcgatttccacggcctgacgccagtcggtggctttacgttgtgcctgtacccatttaatatcgttaatcatccgtcgttgactccatgccgattcgggttaatctggtagcgatccccgtcgatacttttgacgaaggcggcagggatcgcagaagggttattgctctttgccggggataagcgctctgcttatccccatcttatcggcgtatatgatgcactttctccataaactgactgactcgcgcctggtcaacgaaattggcaaaaacgccgtcctttttaaaggtggttgcggtcacacagccatcggcgatactgagttgttcctccacgttttccaggcagacgcccgtgttggccaacacgacggtgtcaggcaccgtttctttgacccgttttaacagcgcgctgtcggtacgcgtcccggcggtcaggccagaaacacagagcgcatcaggatggttgttaaatactgtcgatttagcaatagaacagatatcgcgattgcccagatacacggcggcctctgggacgatattgaacaaggttttcacttcgcctgcaccaatccggtgttgatgacggatggtctcaccgacgttagtgtcccagacgccaaagtcgctggcataggcaccggtaaatatctcgcggataaacttagcgccggtagccatcgccaggtcgaatgaggcgaccggatcccacagaacattcacgccaaacgggatgcggatatcgctcattaattgcccgatgattcgtgccattgccgcagtggtttccggacgcaccttcgtgagatagggaagactaaactcgttggagaacatgactgcatccaccccaccattttggagcgccatcagatcgtcccaggctttgtcgataacccagttcatccccaactgcgcatcaaaactcgggtcgccgggcaatgcacgtagatggcacatggcgatgaccgctttttccgtcccaataacctctttcagccaactcattgaaagtactccttattccgataattcacgtttacgtaagaacagcacgacgctggcgacaataccgaccgccacgacaacgccaataatcccaagcgacatcaattcagaaatcgaccaaccgaacatattgcccacggacaacgctgagatttgcgcactttcaccggcaaaactgaaaccgcctttgagcgccatttcagtgaagtaaggcgcgaactgggtggcgatcagcaggacggtaatcatcacgatgaccccgcttatcaacgtcctgaccaggtctccgcggtggataaccgtagccatacagataaagaacggtgctaccggcaggtctgcgaggggtaacactttgttgcccggtaaaatgctggccagaattaacataatgggtatcagtagcagaccgacagcaatggtggttggatgccccagcgtcacagcagtatccagaccgatatacacttcacgtcctttgaaatatttctggaagaactttcttgcaccgtcggagatgggcagcaggccctcaacaatcaggcggatcatgcgcgggaacaacaccatgattgccgcaacggtaatcatcagactggcgcaacctttaaagccttcaccagccgccaggccaaaaatcagaccgagcactacgccgataatcaccggatcgccgaccatgccgtagcgtttctggatctcctgagcatcgatattgcgtcccttcatgaaagggattttttcatagatagcatcaagtagaacgaaaagcggtactgaactggaaccgtagccttgcggtatcgaaataccttccagcccgacgatgttctgtacccgttttgccgtccagtcggccatttttaacgatagcgccgcatggcagattgcccccagcacaccataaatcaggctaccggtcataagctggaccaccgtacccgtaatggcgtagtgccagtaattgtaaatatcgacgttcatcgttttggtcagacgggtgaccagcatggcgacattgagaagaaaaataactgggataatcatggcgccaatggctgtcgcataaccaacgccggaggcagggcctgcgccaacgtcaaagacatgcagggctaggccgaaacgctcaatcatcactttgatagggggactgaggctgtcgatcgccatgacgatcaccagtcccataccgacaaaaccaatcccaaccgttacccctgccttaatcgcctgcagccaggggatgcggaagataaggccaatcacgatcatgatgatagggacgaaaacggtaccgccgagagacaggatgtaatcaaacataatgcctccttttattgagttaacagagccttgatttgttgttttaacgcgtcgtcgttgatccctgtgagcagggcggcgccattaagcgtagggatgccgtaatcactgttggttcgcatggaggttacaataaggtccataccgttacagttaagagggatctcattcagacagcattgggcggtagtggctgaaatgccctgttcagtcaggaactcttgcagcttgtgtgcaatcatggttgaagtcgacatgccggtaccgcatgccacaaggatctttttcataatggatgtgcctcttgtgtagtgcctgaatcaggctcaacggggaaatgtgctgctgacatacctgccagagcggtcaataggcggatgcaatcagtcaaatcacgcaggctggcaacctccgccggagaatgggtatagcgacaaggaatagagagactggcgcagggaataccatcctgctcaacctggatataaccggtttctgttatcacgccgggagccacttctcgctgcaccggaatgttgtgttcaagagccgtctgttccaacatccgtatcaggcgaggaggcgtgattaatccggccagcgttccccgaccatggtagttcaggcaggtgatcccaacgccctgattaatcctgacctcggaataatcgtgtaaatcaggggtgtcacacgatggagtgatatcaataccaatcgccaggtcaggttttacacggcgtaatacgggaacaatgccgcggatattaaattcttcctgtaccgaagccaccagataaacggcgatatcaagctccatagtactgatagcatccgctacaccgagcagggcagtacagcctagacgatcgtctagtgctttactgcacaccagatcgtttgccaggagttgcggcgggttatacagagtgacaggcgtaccgacctgaatgcccatccgtatagcgtcgtctttgtctttggcaccaatatcaatccacagtttgtcgacagaaggtgactgcgtgcgctcgtcgcctttggcaaagtggtaggacttaatgccgatacaccccatgactggccctttgtccccggtgagggtgacgatggaaccagccatagtgacctgcgcaggaccgcctacgcgttcaaagcgtaaaaatccagacggctctattttgcgcaccataaaaccgacttcatccatatgcgcaaaaatcatcagtcgcagcgcatcgggtttatcactaccgtagcgcgcgacgacattcccaagcctgtctcgccagacctcttttgcctgacgcctgaattcgcacagcatgacgtcagcgacagcgttttcgtgtcctgaaatcgcattgtgctgcaaaagcgagaacagggtttcctgcacagaaaatgacatagctatctccgtagaccgtaaaacaatcactcgttgagcgttttataggcgcagactggtcgaataattgtgagaacgttcacgtgaaaacgcgcaaagctgaacaaataaaaaattatgtgagccgagtggaataaaagcgctcaacgtttgtgaaagttacgggctggagagaccagtgattatggttgaaataatgaggatgaataaaacgcggtaactgttatagcaccactttgttgcaggacgctccctcttcattacgtcctgcacgtggataccccagcatctccatcagcggatcttagaatgtaatggcgcgtggcaggtcgttggttcccagcataatgtaagaaaacatcggatctcctgaatagattcagagggagtatagataatcagctcaaatcactctccgctttatgagcccaggctggcattgccgtcagataacgttttgcacgcttatgtgcttcctccgggccgactttttgccaggaatcaaggaagctggctaaacctgataccgcttcttcccagggtttgagattgccgttgctgtcgctgcattacgcacaatattgatcactggcactgtgtgcatctggtgccgacatcggcattccgcaagcctgacagaactgttcatgttgtgacatatgatgctccttatggtgacatcttgattaataaacatactgaatatgtattgtgcaggtgatacatcagatcaaagcaaaggtaaagcctcgatatttccagccagaaataccgggaacctgttgttaccgggcgatgagtgcgaacacgccccagccaaagcattcccgcgcgtaggtcacgtagcgtttcggcgcgatgtttagttcggccctgacttcggcggcgaagtcatcgtcaggattcgcttccagccagcggcgcatggtcagccattttgcggcttcataccggtcccagccttcctggtctgccagtaccatttccaccacgtcatagccgagatcgtcgaacgctccgacaagtcctggcagcgtcaggaaatcgcttgtcgagctgacgccgcaggcctgggctatttcttctgttgctggtagctgacgccagtagggttcgccgataagcatgatcccgcccggtttcaggctttgcgctagcagctcctccgccccggcaaacccaccggcaatccatgtcgcgccgacgcaggccgccacgtcacatttttcatttgcgacgtaaccggccgcatcgttatgaataaaatgtacgcgttcgctgacgccgagttcttccgcgcgacgctttgcctgcgcggtgaagagcgaactcatgtcgatgccagtccccgtaatgccatgatccctggcccaggtgcagagcatctcgcccgagccgctgccgaggtcaagaatgcgggtgcccggcttcatgcgcagcacgcgacccagcgtggcgtacttctcttcggtgaacgggttatggatgcggtgttcactttcgctgatggtaaaaatacgtgggatatccattatttaattcctgttattgggttaagccttaaaaaggacacaacaagattgttattcacgtcagtgctccggtttcatcagggtctgcgcaccggatgtggccggtcagggtcatgggctgagcggtgagtgattgcatcatccagcaggctttgtgctcctccgggatgggataaggtgccggatagcctttgtctccggcacagggttcgaacccatgtcgggggtaataggtggcgtggccgagaacaaaaaccgtctggcagcccatcaacctcaggtgctcgatgccagtgcgtatcaaccgtcctcccacgcccatcccttggtattccggtatgaccgccaggggagcgaggatgtgcatcaacggtgaatccatttctcctttgaaggttgcccgggtaaataaaatatgcccgacggctttgccttcataccgggctagcagcgataacgcggggcgcgcgctttcatcctcaagtaaagaggccactaaatcggcttctttgctgaagccaaatgcgcgggtttcgacttcccggatatcactggcatcacttttatctgtgatatgaaaagtgaagtggtgtactgtcatagaaactctccttagcgattatcgagctgagcgcgaactttattcagctcggtggtgttgattcgatagggctggccattgacggacttgataagttttttggttttgagttttttgaagacggcgagcgtgcagtcggtcagcaacagcccttcgcggctgtagcattcaacggaagtgacgcggcctgaagaatcgcggacgtgcgcaatacgtctacctttagcgagaacgtgtaaggtatgttgttcctgacgggataaattcatactgaagaacctatttaatcatcatgtgcaaaacgtgcaaacacaccgcggtgtccgcattcgatttcggcgcattgataatcagtccggcctgaaaaggtcggggaactgattatcggatgattacattctccagcatcaaagcctcgggttgagttgaaaggtatttacggagcgaatattaacacgtagttataggagggatatgtttcagtagaaaaagtgtgatgtactttggaaattgaatgccaacccatttactggaaaaggcagatgacactgacgaatgcatgttgaagtacgcctgaaatggcctcatcggcttttcccttcgggagattattctccttttgttaaatccagaacataaatatgctcacccatcttcgatgcttgaaaaattgaagccaatcctgataagtaatttttttgaaagggtattttccggattcacaccggctttgatgagtgaaaaaccgttctcttttattcagtcaatcgtggcggtaattgcttcaattgcatatccctggcgagcataagcgggactgatggtatagccgagccaaaacacatcgcattgctgacgtaaatagatatcaccaatcaaaacctgcgtcatttgttgacaatggccaattgaatatcgcgagcaagtgtaagaactcccagcaagaccctgtaaataattctgtgtaactgcccacgattaaaggtggccgctcaggcggtcaccgtattcgataataaatgggtctggaaaaagtgcagcatctggcagcgtaatgcaggtagcccagttcaactctcactaccagtatgatcccaagttcgagcgcggaatgtatctgtatgagcatcgtcgctgtttcaataacatcatcgactactgtaactcactttgctatcacggtaagttgcagcctaaaagagggatggaaaaaggacgattttccccgcaatgggatatttacatattgatggtagaggcatgaagccaaatggagggagccgtcataaccctcttgaagctgaaacaatagcagcatggctggtggcacataaggatgatatagagcgccattacggggaaccactgtacaaagttgttggtgttgtgacgccattttcggcgcaggttaatgctatcaaaatgtcattgcgtaagctggaaattaatggcaaagacgagcagggtttactgacagtggggactgtgcactccttgcagggggcggaaagggcgattgttctcttttctcctgtctactcaaaacatgaagatggcaggtttcttgatagcaacagcactatcctcaatgttgctgtctcacgcgctaaagatagttttctggtatttggcgatatggaccttatcgagatgcagcccgcattttcgccgcgagggttattggcaaaatatctcttttcttcagataataatgcgttgcaatttgagtttcagaaacgacaggatttaatttccgcacatacacaaatttcaacgctgcatggtgtggagcagcatgatgaatttttgaacaagactcttgccggagctcaaaagaaaataacgattatttccccttggttatcctggcaaaaagtggagcaaacgggatttctggcatcaatggctttggcccgttcccggggcattgatattaccgtggtgacggataaaaactgcaatatagcgcatgtcgatgatgataagcgtcaggagaaacaacatctgctgaatgatgctgttgaaaagctcaataagatgggtatcgctacgaaattggttaatcgtgttcacagcaaaattgtgattgaggatgaagaactgctgtgtgtcggatcttttaactggttcagtgctacacgggaagataagtatcaacgatacgatacgtctttggtgtaccgtggtgaaggcgtaaaaaatgaaataaaggcaatatatggtagtctggatcaacgtcagctttaaatgtgatgagccgttcatgatacaggagtagtaaagggcatattttaccaatgttaaggcgactttccgttttattgcgagtcgcctttcctgattataaatcttattgtttacctaatcattttcctttgcataatgcgcctgggattaatggcgggtgcttttaggaatgaaagaaaatgcaagcaataatataataatggcctaatttctttgaacatcattaagcatatcatcatcgtctatttgccagaatccgtcgacttataatcgccagaacggcatatcaggacggtgctgcgaacgctgtggcccaaaacgttccagtaaactgtgtagatgttcgtagatttccgagccataatcgaaaaggcgcggatgtctattaaggcatccggctaatctgtaagcaataacaacggtttatgcggtgcgcgtttttcacccttgtgccagattattatattggcaattgcctgctgttcgagcccgcaagtgaagagatattaccttgatctcatttgttttttgttgtctactctgagaacgaacaaggacatcccccatgaataaactccccgctcacctttcgcgccaaaactgcaaaattgcttctacaaatctgtcagaaataatcccccgacgggctgcagtgctgaaatgactgcttcgcagtgccgtcgtccagttctccggtgaccggtacgctgaaccgtaatatcccgtgcttaaatcgtccgggtcttcatcaggcgcgttcgtcagtcctctttcaccttgttgctggaagtcgacgaaaataatattggctaaaacattattttgataattgccataaatagcttcatacgaatgcgggaaattttctttccagtaccaggtggtatcgccgcaaaaccacggcgcgtcagtaatattattaagctgagaatggtattgttttagatccctacgaaaggcttcaaccatatgattaaagtgttgagggtgtgacgcgtagtcactggtcattaagtcaaattcgccttgcatccagcatgcgccgaggaatttgttctgcggattttttgccagtgcggctcgcgttctgctgactaaatcctggtacagcggagtatccgttccccaacgacaagcatcatggctggctccgtgccgttctgaatatgtcccttcgctgcccgcggtaaaagccgatccgccacggcaacacggaacgataagaatccctgcattatcaggaatgaagggcagtaatttccgtgcaatatgcagtgcctggccaacggtgccgtactgtgtttgatgattcgttgccagaggatggtgataaccctgcatatcctgaacatcgtgtgggcagtgagtcagtggaataatgtcgttaaagtgacatggcgggcctccgggatgcgtatgcgcaaatctcgctaattgtttaattctgggatgaggcgcatcttccctgtccggtaatggcagtccttcgccatacgccatggcattagactgaccagcaacggtaagaacatagtaataatcgggcgatattattgcgttcatataaatttcgcgtaattgaaatgacaaattgatagcagggcccctttaccggggccctgaagcgttagttttgtactgtgactttattatccttcacagtgatcaaaactgaatccgtcaccgctttgccgcctgcagtttcaccgccaataatcaatagactattattccagggcaatgatactccgtaggcccgaccttgcgataattcacccgatttatcccatttcccgttatgccaaagatgaatatcagtgctatatgattttttcaggccttcatgcgcatagttcttaccgttctggtaattttctcgtgaacctttgaatccggcccctccggcaaatataagagaatcattgcttatccccgcaaaaccgccagctacgccatctggtgatgagacgggagcaagcttattccattttaaattattaccggtgaaatcaagttcaaatacggcatccgttcgcaatcctggtttggcttcgccattaataagccaggttttatcacctttattcacaaccgccgcaccagccgttccgtaccagggcgattcgccagcgtaactccattgctgtgttgagggatcaaaagacaacagaaacttattgaagaaataatcttctgcttttttgtcaaaatagtgagcattgattttatctatagcggttgaatcttttccagcctcgttgagatcttcaaaatagccattgaagatattctggttaacaccaccagtaacataagccttgccgttgtgtacaaaagtcacatggcccgccatgcccatcggcgcgtgcgacatcaatttaacccaactattggttttggggttgtatttgtgtacgtcattaaatacctgagtcaagccctcgctgtttttgccaatgccgccaaacacatacagattgccatcaataaatgcagaggttgcttgatctcttggtccgccagggaatgcagctaacgctgtccattttttatctttggcctgtgtatccagcttgtaccatgccgtacctgcgctacctaaaccaatgtagacagtgtcgttatcaattgctccggtaccacttttaaatggcacaggagtttccggtaatacagacgcgtttgcggcaaatgaagccatcatgatagcaagcgccgttattgttttattcattgtgactgtctcctgtctactacagtttaaatgacacaccaatgcgataactgttttccgataaattatctctgccgttgtaaacaccctgacggtcaaggtagtcatattctatgtatggcgtaatatcgggcgtcatatggtattgtagaacaaatgcattttccgtcgcccatttcttatggtttgcatagcgataatcgttctgtttgctgtatagcgtcgtttgccatgcgaaggtgaaatcactattaatatggtaagtgacatatccatcccaacgatgaacgttatcacgagacatatcaccggataagtcttgttgtcggtaagctttccagtcgtaacgatagcgaatgccaaaattaagatcttttgtcgcgtcccaggacagttttacgtagggtccgtagcgtgtgccgttgctgctaaaatgcgttaacattcccgggcgcaccgtccattgatcatcaagtttaatcgcgtaattaacttcaacctgaacatcattgagtgcggcattttcctttttattatcatgaatggtattccaggtattactttccatgcttgcccaccatccattttgccatccctcactgactttgagtcgagtctcataggcgtggcttccactacgatatccaccacgtacgtccagtgtcgcagcctgagaaattaatggggacgaaaagcacagtaataatacgccagaaagtattttagcctttttcataaatttcactcatttgtaggatacagaaagcaatacaaagcccgcataaacaattagcatttatgttgtgtaatatttttttgccaggcttatagtgtctttggcaaccggtagctgtattttatatttttttgtataaggtctcctgtgaaaaatctcttttcacattatttaaataaacagagatccagattaaatacctgagtataaaatctcttctgatgtttaattgatttgaatgttcgtaagctatatcacttactcaatccattttacccagagtcataaaatagaatgtctgttgatctcattttcatattcctttcagactgaagtgcgttttcatcacccgatgagaaagaactgaagtgatgtttgccatagattgcgagatgccctgtctcattgactatcttggtgcacctttatacctgttataccagatcaaaaatcacgcaatccatacaacaaaaccagatttgcaattcgtgtcacaaaatatgtcgatctttttctaagaggaagatgccatgtgaagccagacgaacacttgcggtggtcttcaaaaactaaagatcttagtttaactatttgttttataaataatttattaagagtctaaacaaggggagctttgcaagctaactcagtgagcttggtgaaaatcagtgtttacccgccatcaggctgagcataattctcatcatgaaatatgtttcctggtttgtggcttgtaactggtcacttctgaagtcgatctggagaggcttgttgatgttggtgttttcaggatgatgtttcacttagtttgtttgccgtatcgcccggcgaatggctgtgattgaggaaggtttaagtcgtagtgaccaaagctatatttaccaacgaatgtagatgaaaaaatcatctcctgcgttcccccatatctctaggataaaaaggaatgtaacaatctcatggcgtaagctgacgaatcagcaggaataatcgctagggacctaagaattagcatgataatagccactaagaaattactgcgctccatgaaatagccattttgtggcaaatggagttgactaataatgtcatatgtgagacggctagttgaacgaatattaaattttgctgaattttttatgttgattttacttgttacagaacatatcacatgatatatagataagattagttgcattaatgatgagggttattattagattcgtatccgattgataaatatataaaggtacatagcatgcaagagcatggcgtttgtatggcaacgttattataattaacagttgctactccatttaagttcactcagaagaactggtccacttacgttagttattaagcaaacgttcgcttttataaacataatcaggataaaaatgttggattattgctaacccagcacagctagtgcgcgtctgtaattataagggaaaaacgatgaagaataaggctgataacaaaaaaaggaacttcctgacccatagtgaaatcgaatcactccttaaagcagcaaataccgggcctcatgcagcacgtaattattgtctgactttgctttgttttattcatggtttccgggcgagtgaaatttgtcgattgaggatttcggatattgatcttaaggcaaagtgtatatatatccatcgattaaaaaaaggcttttcaacaacgcacccgctattgaataaagaagttcaggctttaaaaaactggttgagtatccgtacttcgtacccgcatgctgagagcgagtgggtatttttatcacgtaaggggaatccgctttctcggcaacagttttaccatattatctcgacttccggtggtaatgccgggttgtcactggagattcatccgcacatgttacgccattcgtgtggttttgctttggcgaatatgggaatagatacgcgacttatccaggattatcttgggcatcgcaatattcgtcatactgtctggtataccgccagcaatgcagggcgtttttacggcatctgggatagagccagaggacgacagcgtcacgctgttttatagagatagttgagataccagggatggtgttaaaaactacattattcttacgatatatcaaaaatgattaaccatttattaattgatgttattgtaagtgtgattcttaattatcataataaacattaagttaaccatatccatacaaaatacaatggtttatgttcttcaaaataaataaacaaaatcattcataaatttacacatcacttaaaatctcctgtttccgcacttttttctttattttttaagcaactggaagttaatccactgcaatctattgttatattgaatcaaatcaatgaaaatagatgttgtcacatcagtgatattttatttttgtatgatatttaatgtaattgactgatagccacatcactccgtgtgtggttatctttttatctattgggctaattttgaccgattgaggtttcctataggtattcattcaaatatatctcagttaggagtactactattgtgagtaaacgtcgttatcttaccggtaaagaagttcaggccatgatgcaggcggtttgttacggggcaacgggagccagagattattgtcttattctgttggcatatcggcatgggatgcgtattagtgaactgcttgatctgcattatcaggaccttgaccttaatgaaggtagaataaatattcgccgactgaagaacggattttctaccgttcacccgttacgttttgatgagcgtgaagccgtggaacgctggacccaggaacgtgctaactggaaaggcgctgaccggactgacgctatatttatttctcgccgcgggagtcggctttctcgccagcaggcctatcgcattattcgcgatgccggtattgaagctggaaccgtaacgcagactcatcctcatatgttaaggcatgcttgcggttatgaattggcggagcgtggtgcagatactcgtttaattcaggattatctcgggcatcgaaatattcgccatactgtgcgttataccgccagtaatgctgctcgttttgccggattatgggaaagaaataatctcataaacgaaaaattaaaaagagaagaggtttgatttaacttattgataataaagttaaaaaaacaaataaatacaagacaattggggccaaactgtccatatcataaataagttacgtattttttctcaagcataaaaatattaaaaaacgacaaaaagcatctaactgtttgatatgtaaattatttctattgtaaattaatttcacatcacctccgctatatgtaaagctaacgtttctgtggctcgacgcatcttcctcattcttctctccaaaaaccacctcatgcaatataaacatctataaataaagataacaatagaatattaagccaacaaataaactgaaaaagtttgtccgcgatgctttcctctatgagtcaaaatggccccaaatgtttcatcttttgggggaaaactgtgcagtgttggcagtcaaactcgtttacaaaacaaagtgtacagaacgactgcccatgtcgatttagaaatagttttttgaaaggaaagcagcatgaaaattaaaactctggcaatcgttgttctgtcggctctgtccctcagttctacagcggctctggccgctgccacgacggttaatggtgggaccgttcactttaaaggggaagttgttaacgccgcttgcgcagttgatgcaggctctgttgatcaaaccgttcagttaggacaggttcgtaccgcatcgctggcacaggaaggagcaaccagttctgctgtcggttttaacattcagctgaatgattgcgataccaatgttgcatctaaagccgctgttgcctttttaggtacggcgattgatgcgggtcataccaacgttctggctctgcagagttcagctgcgggtagcgcaacaaacgttggtgtgcagatcctggacagaacgggtgctgcgctgacgctggatggtgcgacatttagttcagaaacaaccctgaataacggaaccaataccattccgttccaggcgcgttattttgcaaccggggccgcaaccccgggtgctgctaatgcggatgcgaccttcaaggttcagtatcaataacctacccaggttcagggacgtcattacgggcagggatgcccacccttgtgcgataaaaataacgatgaaaaggaagagattatttctattagcgtcgttgctgccaatgtttgctctggccggaaataaatggaataccacgttgcccggcggaaatatgcaatttcagggcgtcattattgcggaaacttgccggattgaagccggtgataaacaaatgacggtcaatatggggcaaatcagcagtaaccggtttcatgcggttggggaagatagcgcaccggtgccttttgttattcatttacgggaatgtagcacggtggtgagtgaacgtgtaggtgtggcgtttcacggtgtcgcggatggtaaaaatccggatgtgctttccgtgggagaggggccagggatagccaccaatattggcgtagcgttgtttgatgatgaaggaaacctcgtaccgattaatcgtcctccagcaaactggaaacggctttattcaggctctacttcgctacatttcatcgccaaatatcgtgctaccgggcgtcgggttactggcggcatcgccaatgcccaggcctggttctctttaacctatcagtaattgttcagcagataatgtgataacaggaacaggacagtgagtaataaaaacgtcaatgtaaggaaatcgcaggaaataacattctgcttgctggcaggtatcctgatgttcatggcaatgatggttgccggacgcgctgaagcgggagtggccttaggtgcgactcgcgtaatttatccggcagggcaaaaacaagagcaacttgccgtgacaaataatgatgaaaatagtacctatttaattcaatcatgggtggaaaatgccgatggtgtaaaggatggtcgttttatcgtgacgcctcctctgtttgcgatgaagggaaaaaaagagaataccttacgtattcttgatgcaacaaataaccaattgccacaggaccgggaaagtttattctggatgaacgttaaagcgattccgtcaatggataaatcaaaattgactgagaatacgctacagctcgcaattatcagccgcattaaactgtactatcgcccggctaaattagcgttgccacccgatcaggccgcagaaaaattaagatttcgtcgtagcgcgaattctctgacgctgattaacccgacaccctattacctgacggtaacagagttgaatgccggaacccgggttcttgaaaatgcattggtgcctccaatgggcgaaagcacggttaaattgccttctgatgcaggaagcaatattacttaccgaacaataaatgattatggcgcacttacccccaaaatgacgggcgtaatggaataacgcagggggaatttttcgcctgaataaaaagaattgactgccggggtgattttaagccggaggaataatgtcatatctgaatttaagactttaccagcgaaacacacaatgcttgcatattcgtaagcatcgtttggctggtttttttgtccgactcgttgtcgcctgtgcttttgccgcacaggcacctttgtcatctgccgacctctattttaatccgcgctttttagcggatgatccccaggctgtggccgatttatcgcgttttgaaaatgggcaagaattaccgccagggacgtatcgcgtcgatatctatttgaataatggttatatggcaacgcgtgatgtcacatttaatacgggcgacagtgaacaagggattgttccctgcctgacacgcgcgcaactcgccagtatggggctgaatacggcttctgtcgccggtatgaatctgctggcggatgatgcctgtgtgccattaaccacaatggtccaggacgctactgcgcatctggatgttggtcagcagcgactgaacctgacgatccctcaggcatttatgagtaatcgcgcgcgtggttatattcctcctgagttatgggatcccggtattaatgccggattgctcaattataatttcagcggaaatagtgtacagaatcggattgggggtaacagccattatgcatatttaaacctacagagtgggttaaatattggtgcgtggcgtttacgcgacaataccacctggagttataacagtagcgacagatcatcaggtagcaaaaataaatggcagcatatcaatacctggcttgagcgagacataataccgttacgttcccggctgacgctgggtgatggttatactcagggcgatattttcgatggtattaactttcgcggcgcacaattggcctcagatgacaatatgttacccgatagtcaaagaggatttgccccggtgatccacggtattgctcgtggtactgcacaggtcactattaaacaaaatgggtatgacatttataatagtacggtgccaccggggccttttaccatcaacgatatctatgccgcaggtaatagtggtgacttgcaggtaacgatcaaagaggctgacggcagcacgcagatttttaccgtaccctattcgtcagtcccgcttttgcaacgtgaagggcatactcgttattccattacggcaggagaataccgtagtggaaatgcgcagcaggaaaaaacccgctttttccagagtacattactccacggccttccggctggctggacaatatatggtggaacgcaactggcggatcgttatcgtgcttttaatttcggtatcgggaaaaacatgggggcactgggcgctctgtctgtggatatgacgcaggctaattccacacttcccgatgacagtcagcatgacggacaatcggtgcgttttctctataacaaatcgctcaatgaatcaggcacgaatattcagttagtgggttaccgttattcgaccagcggatattttaatttcgctgatacaacatacagtcgaatgaatggctacaacattgaaacacaggacggagttattcaggttaagccgaaattcaccgactattacaacctcgcttataacaaacgcgggaaattacaactcaccgttactcagcaactcgggcgcacatcaacactgtatttgagtggtagccatcaaacttattggggaacgagtaatgtcgatgagcaattccaggctggattaaatactgcgttcgaagatatcaactggacgctcagctatagcctgacgaaaaacgcctggcaaaaaggacgggatcagatgttagcgcttaacgtcaatattcctttcagccactggctgcgttctgacagtaaatctcagtggcgacatgccagtgccagctacagcatgtcacacgatctcaacggtcggatgaccaatctggctggtgtatacggtacgttgctggaagacaacaacctcagctatagcgtgcaaaccggctatgccgggggaggcgatggaaatagcggaagtacaggctacgccacgctgaattatcgcggtggttacggcaatgccaatatcggttacagccatagcgatgatattaagcagctctattacggagtcagcggtggggtactggctcatgccaatggcgtaacgctggggcagccgttaaacgatacggtggtgcttgttaaagcgcctggcgcaaaagatgcaaaagtcgaaaaccagacgggggtgcgtaccgactggcgtggttatgccgtgctgccttatgccactgaatatcgggaaaatagagtggcgctggataccaataccctggctgataacgtcgatttagataacgcggttgctaacgttgttcccactcgtggggcgatcgtgcgagcagagtttaaagcgcgcgttgggataaaactgctcatgacgctgacccacaataataagccgctgccgtttggggcgatggtgacatcagagagtagccagagtagcggcattgttgcggataatggtcaggtttacctcagcggaatgcctttagcgggaaaagttcaggtgaaatggggagaagaggaaaatgctcactgtgtcgccaattatcaactgccaccagagagtcagcagcagttattaacccagctatcagctgaatgtcgttaagggggcgtgatgagaaacaaacctttttatcttctgtgcgcttttttgtggctggcggtgagtcacgctttggctgcggatagcacgattactatccgcggctatgtcagggataacggctgtagtgtggccgctgaatcaaccaattttactgttgatctgatggaaaacgcggcgaagcaatttaacaacattggcgcgacgactcctgttgttccatttcgtattttgctgtcaccctgtggtaatgccgtttctgccgtaaaggttgggtttactggcgttgcagatagccacaatgccaacctgcttgcacttgaaaatacggtgtcagcggcttcgggactgggaatacagcttctgaatgagcagcaaaatcaaataccccttaatgctccatcgtccgcgctttcgtggacgaccctgacgccgggtaaaccaaatacgctgaatttttacgcccggctaatggcgacacaggtgcctgtcactgcggggcatatcaatgccacggctaccttcactcttgaatatcagtaactggagatgctcatgaaatggtgcaaacgtgggtatgtattggcggcaatattggcgctcgcaagtgcgacgatacaggcagccgatgtcaccatcacggtgaacggtaaggtcgtcgccaaaccgtgtacggtttccaccaccaatgccacggttgatctcggcgatctttattctttcagtcttatgtctgccggggcggcatcggcctggcatgatgttgcgcttgagttgactaattgtccggtgggaacgtcgagggtcactgccagcttcagcggggcagccgacagtaccggatattataaaaaccaggggaccgcgcaaaacatccagttagagctacaggatgacagtggcaacacattgaatactggcgcaaccaaaacagttcaggtggatgattcctcacaatcagcgcacttcccgttacaggtcagagcattgacagtaaatggcggagccactcagggaaccattcaggcagtgattagcatcacctatacctacagctgaacccgaagagatgattgtaatgaaacgagttattaccctgtttgctgtactgctgatgggctggtcggtaaatgcctggtcattcgcctgtaaaaccgccaatggtaccgctatccctattggcggtggcagcgccaatgtttatgtaaaccttgcgcccgtcgtgaatgtggggcaaaacctggtcgtggatctttcgacgcaaatcttttgccataacgattatccggaaaccattacagactatgtcacactgcaacgaggctcggcttatggcggcgtgttatctaatttttccgggaccgtaaaatatagtggcagtagctatccatttcctaccaccagcgaaacgccgcgcgttgtttataattcgagaacggataagccgtggccggtggcgctttatttgacgcctgtgagcagtgcgggcggggtggcgattaaagctggctcattaattgccgtgcttattttgcgacagaccaacaactataacagcgatgatttccagtttgtgtggaatatttacgccaataatgatgtggtggtgcctactggcggctgcgatgtttctgctcgtgatgtcaccgttactctgccggactaccctggttcagtgccaattcctcttaccgtttattgtgcgaaaagccaaaacctggggtattacctctccggcacaaccgcagatgcgggcaactcgattttcaccaataccgcgtcgttttcacctgcacagggcgtcggcgtacagttgacgcgcaacggtacgattattccagcgaataacacggtatcgttaggagcagtagggacttcggcggtgagtctgggattaacggcaaattatgcacgtaccggagggcaggtgactgcagggaatgtgcaatcgattattggcgtgacttttgtttatcaataaagaaatcacaggacattgctaatgctggtacgcaatattacctgaagctaaaaacctgcacgttagccctttgtaggccagataagacgcgtcagcgtcgcatctggcataaacaaagcgcactttgctggtctgttcccctcaccctaaccctctccccggaggggcgaggggactgtccgggcacatttttagactttgtcatcagtctgagcctgccattggcaggctctggtgtccttttacgctaccatgctaataatcagcacaataatcagcccaaccacggagttgaccagctccagcagaccccaggttttcaacgtgtcttttactgacaggtcaaagtaacctttgaacaaccagaaagatgcatcgttaatgtgggtgagggtgttggaacccgcagccgtcgccagtaccagcagcgccggattcacgccaaccagctgaccagttgctggatctaggattgcagcactgataatcccggcggcggtcatcgccgaaacgacaccctgacccgtcgccagacgaattagcacagtgatcagccatgccatgatgtagggcgagatattgccgtgggacatcaacatgccgatggtgtcgccaatgccggtgtcgatgatggtctgcttcagcacgccacccgcaccgatgatcagaatcaccattgcaatactcttcaccgcgctttcaaaagcgttcatcacccactgcatgtcatgaccacgtgcggtgccaaagagtacgaatgcaaccaccatcgcaataaacattgcaatcggcgaggaaccgataaagttaaccacttcccaggcaggggtatcttttaccagccagatattggcgatggtggtagagatcataatgatcgccgggatcagcggcaccagaatcgaaacgccgaaagagggcagattattcatatctaccggttgatctgctttcaggaatgatggcgttgggcgctcaagattgccgaggaacttcggcaggatcagacctgcgcagattacacttgggatcgtcaccagtacgccatagatataaaccatccccatatccgcgccataagcattcaccagcgccaccggacccggctgcggtgggaacagtgaatgtgcggtagtggcagctgctactgccgggatcgccagtttcaggaacggaattttagcttcggcggcaataacaataaccagcggcgctaacatgataaaggccacttcatagaacatcgccagaccaaaaatcaggccgatgataatcaccgacagctgtacatagcgcagaccgagacgcgccagcagcgtatgcgctatctggtgagccgcgccggagtcgaccatcaatttaccgatgaccgcaccgaacaccacgatgatagccagttcccccagcgtgttgccgaagcccgctttcatagtgtgcagcagcgacatcaaatccatgcccgccagcatcccgacggacagcgccgccaccaacaaagccaccattgaattgattttgaacttcaaattcagtaccagcatcagaccaatgccgaataccacccagagaatgttaagcacatgcataacgttttaccttacctggttgaaccgttgttattttgggcgatatgttatgtaaattggtcaaccattgttgcgatgaatgtcacatcctctgatcaataaccatcgattaccctttgctgcaatttgcagcaacaaccatgagagtgaaattcttgtgatgtggttaaccaatttcagaattcgggttgacatgtcttaccaaaaggtagaacttatacgccatctcatccgatgcaacgccacggctgcggtctggttgttcatccggatacctaaacaactccagggttccgcgtctctttgctgtggaacccactatgtgaaagaggaaaaatcatggaacagacctggcgctggtacggcccaaacgatccggtttctttagctgatgtccgtcaggcgggcgcaactggcgtggttaccgcgctgcaccatatcccgaacggcgaagtatggtccgttgaagagatcctcaaacgcaaggcgatcattgaagacgcaggcctggtgtggtctgtcgtagaaagcgtgccaattcacgaagatatcaaaacccacactggcaactatgagcagtggatcgctaactatcagcagactctgcgcaacctggcgcagtgtggcattcgcaccgtgtgctacaacttcatgccggtgctcgactggacccgtactgacctcgaatacgtgctgccagacggctccaaagctctgcgcttcgaccagatcgaattcgctgcattcgaaatgcatatcctgaaacgcccaggcgcggaagcggattacaccgaagaagaaattgctcaggcagctgaacgcttcgccactatgagcgatgaagacaaagcgcgtctgacccgtaacatcattgctggtcttccgggcgcggaagaaggctacaccctcgaccagttccgtaaacacctggagctgtacaaagatatcgacaaagcgaagctgcgcgaaaactttgccgtcttcctgaaagcgattattccagttgctgaagaagtcggcgtgcgtatggctgttcacccggacgatccgccgcgcccgatcctcggcctgccgcgcattgtttccaccattgaagatatgcagtggatggttgataccgtaaacagcatggcaaacggttttaccatgtgcaccggttcctacggcgtgcgtgctgacaacgatctggttgatatgatcaagcagttcggtccgcgtatttacttcacccatctgcgctccaccatgcgtgaagataacccgaaaaccttccacgaagcggcgcacctgaacggtgacgttgatatgtacgaagtggtgaaagcgattgttgaagaagaacaccgtcgtaaagcggaaggcaaagaagacctgatcccgatgcgtccggaccacggtcatcagatgctggacgacctgaagaagaaaaccaacccaggttactccgcaattggtcgtctgaaaggcctggccgaagttcgcggtgtcgaactggcgatccagcgcgctttctttagccgttaatatccaccggcatggctgcgcgccgtgccggttccttcttccttgccgtcactctttgaagacggattctggagtttacgatgactactattgttgacagcaatctgccggttgcccgcccgtcatgggatcattctcgtctggaatcacgcattgtgcatctcggttgcggggcgtttcaccgcgcgcaccaggcgctgtatacccatcatctgctggaaagcaccgacagcgactggggcatctgcgaagttaacctgatgccaggcaacgaccgcgtgctgatcgaaaacctgaaaaaacagcaactgctgtacaccgtagcggaaaaaggcgcagagagcaccgagctgaaaattatcggttcgatgaaagaagcgctgcatccggaaatcgatggctgcgaaggtattctcaacgcgatggcgcgtccgcaaacggcgattgtctctctaacggtcacggaaaaaggctactgcgctgatgcggcaagcggtcaactggatctcaataacccgctgatcaagcacgatctggaaaacccgactgcgccgaagtccgcgattggttacatcgtcgaagcgttgcgtctgcgtcgtgaaaaagggttgaaagcgtttacggtgatgtcctgcgataacgtgcgtgaaaacggtcatgtggcgaaggtcgcggtactggggctggctcaggcgcgtgacccgcagctggcggcatggattgaagaaaatgtcaccttcccgtgcaccatggttgaccgcatcgttccggcggcgacgccagaaaccttacaggaaattgctgaccagctgggtgtttacgacccgtgcgccattgcctgcgaaccgttccgtcagtgggtgattgaagataacttcgttaatggtcgcccggattgggataaagtgggcgcacagttcgttgcagacgttgtgccgttcgaaatgatgaagctgcgtatgctgaacggcagccactcttttctggcgtacctcggttacctcggcggctatgaaaccattgccgacaccgtgactaacccggcttatcgcaaagcggcctttgccctgatgatgcaggaacaagcgccaacgctgtcgatgccggaaggtacagacctgaacgcctatgcgacgctgctgatcgagcgtttcagcaacccgtctctgcgtcaccgtacctggcagattgcgatggacggcagccagaagttaccgcagcgtctgctggacccggtgcgtctgcacctgcaaaacggcggcagctggcgtcacctggcgctgggcgtggctggctggatgcgttacacccagggcgtggatgagcagggtaatgccattgacgtggtcgacccgatgctggcggagttccagaagatcaacgcgcagtatcagggcgcagaccgcgtgaaagcgctgctgggcctgagcggtatttttgccgatgatctgccgcagaatgccgactttgttggcgcagtgacggcggcatatcagcagctgtgcgaacgcggtgcgcgcgagtgtgtggctgcgctgtaactaactgattaccctacagacttactggtcaatcaaactgatatttggttgaccagttttcgtttttttgcccacctgtacgtgccaacttccagtgctaatggtatagtttgagattaacgggggccgtaaaattgcccgttgtaggccggataaggcgttcacgccgcatccggcaaaaatttgattaaccgcacctaacggacacaacaccatgaaatctgccacctctgcgcaaagaccttaccaggaagtcggggcgatgatccgcgatctgatcataaagacgccgtacaatcctggcgaacggctgccgccggagcgtgaaattgcagaaatgcttgatgtcacgcggacggtggtacgtgaagcgctgatcatgctggagatcaaagggctggtggaagtacgccggggtgccggtatctatgttcttgataactcaggcagccagaacacagacagtccggatgccaacgtctgcaacgatgccggtccttttgagctgttacaggcgcggcagttattggagagcaacatcgccgagtttgccgctttgcaggctacccgcgaagatatcgtcaaaatgcgtcaggcattgcaactggaagagcgtgaactggcttccagtgcgccgggcagcagcgaaagcggtgacatgcagttccatctcgctattgccgaagcaacgcataacagcatgctggtggagctgttccgtcagtcctggcagtggcgggaaaacaatccaatgtggatccagttgcacagccatctggatgacagcctgtatcgcaaagagtggttgggcgatcacaaacagatcctcgccgcgttaatcaaaaaagatgcccgagcggcgaagctggcaatgtggcagcatctggaaaacgttaagcaacgtctgctggaattctcgaacgttgacgatatttattttgatggctatctgtttgattcatggccgctggataaagtcgacgcctgacttattataataagcgcaagggtaaacgttccttgcgctttcttaaattaagaagtcgcaatgagtattactttgtaaattgcagggtattgtttagctatctgtataacctgaatgttagtactcattcttcctggtagttatttaccaatataattccattcaccattttttaattcaaacagttctggaagagatgacggttgcagagtcatacgtttgagtggtgcattttcatcacccgggataactttatatcccatttttgcatggatctccgcggtaccgggataggcttctataccaattattgggtcattacccaactcaatattagcattaagtaatgcggcaagggcgaatccggaagaatttgctacccctgttaccgtcattatctgatcaatatagatatcaatccttggctgctcattggtccatctttttgcctgagaagctggaagggttgaaatatatcctatcgtggttccggcataaccaggaacattgcaaccagggcctaatgttatttcatgaactgtatagtcctcaacaggatcgaaagggctcttcataaataaatttagccgtaaaccttctgctaactctgtggtagcatgcgcctttttacatatgccaccatatatttcgtctaaagctgaggtgattttcaagttccgatagagcatacgtcctgttgttgtaataccatcggattctctgcatgctcctgtcacataattaaatggccaaggctctttactaatatcaagttttctaatttcgacaacgctttttccatcgtaattatggttattgccacgagtaagaggcggaagatagatgttttccgaatccatgcgtgcatattttaatttacgtgtaaactcactgtcgactattgggtgatgaaggaagtgagcatctgtaataatttgactctgaagggcattgcttaatggcatagacataatagttaccttttatgagtatttcactgatgtttagaaaaatagataaatttttctgtagtaaaaagagaagtaaacaaatgacatgcatgtttctgttgtagtgatatcaactctacacggtgatattaaagggtaggaaacactctaaagtatcaaaaaacgctcatttaaaattatttgcatgcaatttaaaagcatatcttattactaattggaatttgatgttgctatattgaggtctatattaataatgcctgtgaatggtatttttgatgtatttgatatgttatcaatttatattatttacaaactaattgtttcaaataatacatggctgattatgcggaaataaataatttcccaccggaattaagtagcagcggtgacaagtattttcatctacgtaactattcggaatattcagaatatactagcggtttttttttgagtttgatgatttttatcaaatcatgacttttttcctgaaaagtcagtagatattcataggcaagtaaggttttatactttgctgacaggattcaggcctgtctcagactgacatggatgtaatgaacaaaagggaatggctatggaaaatgagcatcaatacagtggtgcccggtgttcagggcaagccgcatatgttgctaaacgtcaggagtgcgcaaaatgatgcgacaatcacttcaggctgttttacctgaaatttcaggcaataaaacgtcatcgctgcgtaaatcggtatgcagcgatctcctcactctttttaattctcctcattcggcattaccgtcattacttgtttcaggcatgcccgagtggcaagtgcataacccgagcgacaaacatctccagagctggtattgccgtcagctgcgttctgcactgttatttcatgagccacggattgcggcgttgcaggttaatttgaaagaagcgtactgccacactctggcgatcagccttgagataatgctgtaccacgacgatgaaccgctaacgtttgatctggtctgggataatggcggttggcgcagtgcgacgctggagaatgtcagctaagcacaatctccagctcgcgcagttcacgccagaagcgttcggcaacgggattcatgcgggtattcatccggtatgcataggcctgaatcgggatcaccagttcgtcccgattcagtacaacgagcttcccgctgcgaatttcttgttggatggcgtactccggcagccaggcaatcccacagccgtcgagggcaacctgctttaaaagctcgctcatcgaagagacaaaaaaggtgctgaaacttaactcactgtggcgcgtcagggtgcgattaatcaatcgccccatgtaggagttgcggctgtaattcagtaacggaaagtgtggctgcgcgaggttaaaaagtgcttctccgtgttcgtcactggcgcagacagggaacaattgagattcaaataagcgaatgtggtcaaacggcgcttccagcaaatcttcgtcgtgaaaggaaaaaatacagtcactttgcccttcacgcagtttatcgaccgcttcatcgacatcaatagcttcaattgcccaggtaaagagcggcggcatctggctgataatggacggtaacagcccgagggaaagagagtgtgcagcggctatcttgatttttcgttgcgcgtaatcgctgccgccacgcagctctgccagattgctctctaactgttgcaacagatggcggatctgcgaatggaagattttcccttgttctgagagttgcagcggcgttacctggcggttaaacaattcaacaccaatcgcctgttccagcgcacggatgcggcggctgaatgccggttgcgagacgttgcgactgactgccgcctgggaaaaattgcggcatttttccagggtcagaaaatcataaagccatttggtttcaatattatgcaaaatcgcaccacagtcatccattacgttttactctgtcagccgcccttgcgggcattctacgtccattcgggcggctgacaaccgtttaagccgtttcaaacgttcctttcacgcaggctttgccgtctttgaccatcagtttgccgcgagcgtatacctgctcaatgcgcagttctggcgtcatgaccagcaagtcagcatcattgcctggcagaatttcgcctttcccggtcaggttaaggaaaccggctacgctactggtgagcgggcgcagggcatcgctgatactgaaatcatagtctttgaccagcacctgcacggtttccagcaacgtttcaaaaccggcaacaccgatatgggttaaattcccttcgtcatcgaagaacggctggctaccgttgccgtcggagctgagggtgacgcgtgccagcggaatacccgcctgaacggcgcgggcaataccttcggcaggggcgaccggttcgtcaatgctgctggtgatatcgatggtgccgcctttgcgcgcgaactccagcgcctgctcaaacaacggtacgttgcggttaacgtgggtcggcagcagcttgctgatcggcacatcgcagttttccagcaggtcataaataggctgtaacgcctttttactgtcgcccatgtggaacacggtgacgccaggtttaccgccgagcaaaccgccaacgcgggattctgccgccatattggccaggtgataaacgtccggtgcggcagaacggtgatcagagatggcgcatttcacgccaatcacacgatcgataatcgccacgtctttttccacggaacccgtaatggtgcgggaagggacatgataagcgccggtcagcatccaggcgctgatgccttcttcattgagcgcacgggtcttggcgagcagggattccgggtggcgagagatagagtcggtgcccagcagaccaaccactgacgtgacgcccgcttccgtcaggcgacttagcgccacttccggcgtgcgcgtcgtgggacctgcttcgccgccaccgccaatcaaatggacgtgttgatcaataaaacctgggcagaggatctgcccactgagatcgacaaccgtgcagttcggtacaatgtcagaagggatattgctggcaacggcgataattttgccgttagcgacgaggacatcgcaaattccccgatcttccggcgcatacaaatgcgctccctgcagcagggtaaaaccggctgcggtataatcaatcatggtaactccttgttaaacaataagctgcataacccagatcgacagcaatgcgttaatcacgcagaccgtaatgatatgcgggtaatatttggcattcacttcggctgtccccaggcagcgaccgacattttgcaccgggttgcccattaaatacatcgcgggcagtaaaacggtgacatcgtgaccggttaatgcgccagcggttgccagactggcggcaacaccgactgcgccacccatactcattaatgcggctaaaaggacggttgccgcttcaccgggtaatccccacagcgccattacgggttcacagatatgccccacccagtcgagcaggccggtaattttcagcgcctgaatgatgacaaacgccatcaccacgtttggcagcaggttggtcgtggcgatagtaaagccacggcgcgcgccatcgataaacatatccatgacgtttttgcggacctgagttgtcatgcttgcgctccttgcgttgggttgcgacgttcttcgaagttaagccagacgcgcaaaatgttggctccgacaaatttaaacaccaggatgacggctaaaggtacgattacggacgtgcccagaaaggcaaacaccgcgacgccggaagagaagtagttggtgatgatggcgctaccgctggtttgatatgcggcgaaaatcactttatcgcgttcggtaatttcaccttcctgcgccagctctttggtcataccggcggcggcatcggtgttttgcaggttagcgatcagcgccagcgagcagatccctggaatgcccaacaacggttttagcacaggtgtcattaactgctgcgcggcgcgtaatccaccaagaccatcggtaattgaaataatccccagagagagaatgactgacggtgccagctccagcgcaaagagaaagccatctttagcccccgcgccacccgcgccgcgaaatgaggtggtggctccgttcgcaccaggcagttgcccaaacgatccgttcagaacggaaaaatcaaaaacgcgccaccagctgtctgttccggaaaaaacaccggaaaaaaagattatggtgagaaaaaaggccagataccctttaatgcccactttttctgtcgccagctccccggctacagcatccccttgttgtgtcataacaatccccattgtttttttgtgtttgtgtgttgcttgagccaggaaaattcctggaactgaaaaaccttatcagccatgtgggtatggggaaaatgcaagtatgtttctggctatgcgttttttgcatagcggaaaaattacgctgtgtggaaaaggctctgcgcaggattgagttgcagaaaattcataaaccaagtgacaatgacatcagtaaataaaaacagaaaatccagggacgaaaacgagatggcaaagtacaacgaaaaagagctggcggatacgagcaagtttttaagttttgtcctccgacacaaaccggaggcgattggtatcgtactggaccgtgaaggatgggcggatatcgataagctcatactttgtgcccaaaaagcgggcaagcggttaacccgtgcattgctggatactgtggttgccaccagcgataaaaagcgttttagttattccagtgatggtaggtgcatccgcgcggttcaggggcattcgacttcgcaggtcgctatttcctttgccgaaaaaacaccgccacagtttctctaccacggtacggcaagccgtttccttgacgagataaaaaaacaggggctgattgcaggtgagcgtcactacgtacatctctctgctgatgaagcaacggcacgcaaagtgggagcaagacacggatcgccggttattttaaccgtcaaagcacaggaaatggcgaaacgaggcctccctttctggcaagcggaaaacggggtctggctgacatcaacggttgcggttgagtttcttgagtggtaagggaaacttccctcatgaagtgaccacttgtagcttaaataattgcactgtgctgataagcgcagcaataaacaacgccgccgcgccgcagagagtggcgctggcaagcgccgatgttccattgctgagcatactggtcagcgccgggccgaggatttgcccaatgccgtaaatgagcgtcacaaagcctaaaagattgagatttcccggtacgctcagttggcgggcgatagtcatcaccagagatgtcgtgcccataaaggtaccgccaaaaccaagactgctgatgataagcaagagaggcgagtcgctggcgagagtaagcagcacacagatagcctgcaccagcaaattcgccgtcaggcagggcaaagccccccaacgttttgctgcccatagccagccaaagcaaccaggcacaattgataagccgactaacgtccagagatgggcggttaacaatggtgagcctgcatctttcgccatgagcggcaggtaagtcgcgacgatgatataaccaaatcccgccaggccgtacagaatagccagtaaccaccagctcattatctgttgctccgtttttgccaatggcattggtgtgatggcgtgttttttcgagggcattaaaagcgtaagtgcaatcagcatcatgccagaaagcgccccggcgccttgccataacgtttgcgaggagaggtcaaaatgcaggcctgccagaacatattcattgcccagtgcgatgccaatgccaacgccagaaaacaaagctgccagcacaaaaggatggcgcgtgtgctgcataatcagcgtcgaaccaaaaatcagcataccggcgctggcgacacccgccaggacgcgaatcaataacaccagaataaatggcggcaaccatgccattgcgaggatcaacaacccgctcgccagggcagaagccaacagaaatgggcgcaggcgcgatggctggtgaaatgcgccaaaagaaaatagcagactgccagccagataccccgcatagttgccgctggcaatccacgagagctggctaaatgaaaacgatccttccgccatcatgacgggcaacataggcgtataaaggaagcggcctaaacccatacctaaggtcagaaccagcatcccgaaaagcgcggtgctgaaagaaaagcgttctacgggatgcgtggacgaaggcatgtttaaccttgtttgtcatttttgttgttaacaagttaataacaaaaaggtgaagcatgccagcctgttaatgcgatgattgaggggtaaagcgataaaaacgatttggttcgctaacgatataaatattaccagaggcatccatcgcaaccccttcggcctgtttgatgttatgcgacaaacctcgactgcctttggttagtgacatttcaccgataacctcgccaaccagggttacttcctggagtgcgcgagattcatgagacagcaccagaagcgtatttttttgctggttaaattctgcgccggacacatcatctaaagtaaattgccgttgtagtgcctcgtctttgctgatgtgtaattcattgctacttaacagcccgttaactttgtagacctcaatcggatttttctctttaaaaaaccagaaagtgtgatcctggcgagaataagccaacccttcaaaaccgcaattggttggggagtcttgcagcgggatttttatttttttgaggatttttacttccgagtttggggtcagtgaaatcacataaatggcgtaatcgcgctcatcgctaatgacaaactgattatcgccaatgtattcgatcgtctcgagatccttaacaaaatccagaggaattgtgcggataaaatcaccattggtggtcatttcaacaatggcggcaggtttgttgatagtgctaaaaagagtattgctttgtgccgaccaggtcagcgaagagatattattcgttatgcctgcaatttctttgccgtcaatggtggcgtggtaattctgaaatgatgctgcatgattgcttttacgggcgcaagattgcacgaagaaagtacacactgccacaatggcaaaaagaatcacaataatggagatgcgtttacttaacgaaatactttttgtcacggtaatccctttaaggcaaatcaataagatatcgagaagtatacgtagcgaccttaatgaatccttaacgcggagaaaccccgtaatgtgcaatgcagcgccagacaccatcctgctggcaataaattgactcagtcagcccagggatcacccattgtatttcctcgccggggggacaggtcagccaaatgcataacccgcagccgccgcgtaaatcacggggaatatcgctgacgcgaaaagtcatgcccgctgcctgcaacgctttgcgggtttgtatgacgccgaccgtggagtgaaataaaaataaaaactctttcatcggcgtgtcctcactcgttgaccaattaccgccgcgccaattgcgccagcaaattgcgcatcaggatgggtatttaccggcattcgcaggtgagattccagcatccgggcaaacttctggcaatgactaacgccaccagtaaacagaatcggcgcttcacaggagagacgagcaatgaaattggcactcctccgcgccatcgcgttaatcactcctgcgagaatcgcttctggcgcgacgcccgctgagcgcaggctgatcgcttctgattcagcaaacactgtgcacatactcgtgatggcgtgcggcgtgacattttcggtaatgctgtcgagttgctcgacgctggtgccaagcgtgcgcgagatcacctccaggaaacgcccggtgcccgccgcgcatttgtcattcatcaggaaatcgcacaggttaccgtcatcatcaagctgaatcactttgctgtcctgaccaccgatgtcgattaccgcgcgcgttgctggcgcaagaaaccgtgcgcccagcccgtgacaggagatttccgttacctgtttatcggcaaaatccaccagttgccgcccgtagccggtgagcgtcagaaacggcgttgtctctaacccttcgcgcagagtttcccaggcttcagtaattgctgttgccgggcgaaagggggttggaacgaggaaacggcgcgtaatcacgccgtctgccagtaagatccctttggtggcggttgagccggaatcaatgccaatcgaatatgccactgccactccttacagcatctcaataaaggccgcgacacgggtactgagctgcccgacatccgaggtggagtagtctgtttcaatagcgatataaggaatgttgtgctgctggcgcacatgacgtttaatcgccagcgattccaccgcgtaggtatggcacgcctgcaaaatcacatcaactacgccatcgacctgatattcctccaccatctggctgagcattttcaggcgctgatcgttcggcgaaacacaggagcagccaatcgccagatatttatccgccagcgcgtcgtagacatcgcccgtttctgccacgcattgctcggtcgctttcgccccggtgcagttttcataaccgacaacccagccgccattctcttcaatcgcgcgcaccactttttctgctgcgccgccaatcgggcagccggtgattaaaatgcgcggacgcgggtccagtcgctggccttcttcccactgctgacgaacgcgggcggtcattgcatccagttcattgatcaacgcctctttatcgaaccggaaggttgcgccgtaaaccactttcagaatgtcgctgccgctaagcgccggaggatttaactgcccaagatgataaaaattagccagtgcgcgacgttcgcggtttttcagcgcaatggcatcgcgcagagcatcttcgctaatctcgtgcccaaaacgttcttctaccgttttttgcaagcgcagcatctcggctttccataacgcacgcgaggcatcgtccttaacgctgttgggcaattgcatcacatgaacaggcttaaactccgccatgtattcatacattttctttttgccgtcgcaggtggtttcaccgaccaccagatccgaaaagtagaagtaggggcatttatcggttttgccgaagccgtagctgcttttaatcagcgggcagaggttgcgcggcagatctttctccgcttcttcaatggtttcatcagaggtggaacagagcgaaaccacaaccgcaccggctgccatcgggatctcttgcggcataaaggtgcagtaagtgccaaccagcggaatgccgcgctccttgagatccatgacggtgagaaagcctgtctggcgagcttcagagaactgatcgaaaatggcgggtagatcggtgacaagtgacatgattttccttccccgtaccacgggagataatgaaaagaggccacattattaccattcttttagtatggtttatttgatctctctcgcggttagccacttagtttttcatggatttctaaaaattgccgagggggaacaaggccgggagctgcgacagcaaatataaaattagcccaatacaaccgccaaccagcgtaccgttgacacgaataaactgcagatctttgccgatatttaactctatttgccgcgacatatcccgcgcatcccagctttttaccgtatcgctgatgtggcgcgtcaggaatgcggaaaactcaggcgcgacgcggtgcgcggcttgttcaagatgaccatttaacgacgcccgcaaggcatcatcggcaattaacgtttcgccaaaccattgacccgctcgtgcgatgcgttctttcacacgagaatcttcactgttgatatccactttcagccattcccgtaaatccccccacaattcactgagatagcgattaaaagcttcatcttctttcagatagctttttacggcatcggctcgcgctgccatttccggatcgtttttcagcttgtcgatcagggcgaaggtggcgcgatcaaacgcatggcggatctgatgcgcacgatcgcgactaatatcatcaagcaaagaattcaccgcgtcagaaaccaactccgcgctatgttcgcccaaccattcggtggggagaattttggctttcagtggatgctcgctctccagccagcgaacaatttgctgggcgataaacttgcgcgatttatcgcgctggagaagggcgatcaactgtgcgatcagcgtatccagcagcacctgatgacgatcgtttttggtcatactctccagcatcaacgcactggtgccggaaagatcgaccttatcaatcgcccgatggaccgcgcgcttaagcaggcgctgaatacgcgcatcatcggtaagttcgagaaaaccgctcatgatctgcaacagatgctgaccaacgcggcgggcgttttctggctggctaaaccagttgccaatcagcaacgccggttcgtggcgtcgaatcaatgccaccagggattgagtatcaagaaatttttcctgcacgaactggccgagattttcgccaatccggtctttattacgcgggataatcgccgtatggcgagaaatgatcggaatcggcacgcggcgaaacagcgccaccaccgcaaaccagtccgccagcgcgccgaccatcgccgcttcagcaatcgccttcacgccgctcacccaaaaattgggcggcaaaaacagcgtaacgacaaaggtagcagcggcgataagcagtaaagagagcgccaaccttttggcgcgtctgagttcgatgagtttattcataacgttaagaatagagcctgacggccggatcgcgcaaaaatcactgctcctccactagctcggctgcctgatgctggcgcacgcgattgagcaatcccgccagggtgaaaacgacgataacgcccgccacaacggctaacagatgaaacggcaagcgaccgccgttaaaccatagccagcggccgatttcgaccgagaccgacatcaccatcaggatcaccatatttagcgatgcggagacggtccctttcggtaacttattggaaaacagcgtaaagcggaataaggtcgggaaaatcaaaccaatcccgaaagcatacagactggtgcccagcaccgaccacagccagacgtgcggcgacagcagattgccgacaatcaacagcgagaggccgaccagttgaatgggtacggcacgccagataaaccgcggttcggtcggatctttaacaaaacgcgccacgatggcattcgcaacaatcaccgcgccgaacaccggaacctgtgtccaggcgaactgcgaagttgttaagctgcctgcatcgataaggatcaccggcgagacagccacccagctcatcatcgggatatagcttaaagagatggttgctgcgccaaagaggaacagccgattgcaaaagacattacgaaaatcgcgcaagacgcttttggcgctaaacggaaccgcgccgcgcttcaccgtctctggcatcgccaacagtaagccaacaaatgagataaaacccataaccgcaatgatggcaaaaaggactttccagtgcataaagtgcatcagagctgcgccggaaagcgggccgataatcggcgcaatcagtacgatggaggtgataatcgccatcaacttgatcccttttgtctgtccgaacgcctcctgcaccgtgacataaccaacggtggcaataaaacagatactggtgccctgaattgcacgcgcgataagaaactgtgtcatagacgttgtgaacattgtcgcggcgcaggcaagggtaaaaattagcgccccggtaatcagcaccggcctgcggccaattctgtcggaaagcggccccagcagccactgtaacgccataccgccagcaagatagagactgacggcagcaggggccagactgacatcggcattaaaatcacgtaccacattaatgatcccaggctggatcagatccgtcgacagatacgcagcaaagtcatacaaaatcaacgccatcgggaaaaacagcgtggcggcatggcgggtaaaaaaacgtggcataacaaacaactccttgtccggagaaccccaacggggaaaacgaaattcaataccgtcggtaatgacgaaaggcaggtgagaagggcaacgagactgcaaatgtactgaatttcatgtaatcaaccacactgcctgtgaacacacagacagagaaatactttctgacttcgggtcagaatgtataacgattacaaatagtcatcagcacattacacctcttgaattgatgggttgcatagaaaatatacaccttaagtgtaattaaaatttgcggttaatcaaaagagcgcggtggaaaggggaatatctgccgggtacaggacatgtaaaacgcgagcttgtttccggaaaaatgtatcgtttgcagaagaataaaaatagcctggaaagcgcctcggggaatgggaaattgccgggtgagaatggttttgttagtcgctaaagtcaggccatctttttcaacaggtgatggatcgccatgacaaacttcacgaccagcacgccgcatgatgcattatttaaaacctttctcacgcaccctgacactgcgcgggattttatggagattcacttacctaaagatttacgtgaactgtgcgatctcgatagcttaaaactggaatccgccagctttgtcgatgaaaaattgcgggcgctacactccgatattttatggtcggtaaagacccgcgaaggcgatggctatatctatgtggtgattgaacatcagagccgcgaggacattcatatggcctttcgcctgatgcgctattccatggcggtgatgtagcgccatatagagcatgataaacgccagccgctaccgttggtcatcccgatgctattttatcacggtagccgtagtccttacccctggtccctgtgctggctggacgaatttgccgacccgactaccgcacggaagctttataacgccgcgttcccgctggtggatgttactgtcgtgccagacgacgagattgtgcagcatcgcagagtcgccctgttggagttgatccaaaagcatattcgccagcgcgatctgatggggcttatcgatcaactggtagtattactggttacagagtgtgctaatgacagccagataactgcgctgttaaattacattttactgactggcgatgaagcgcgttttaatgagtttatcagtgaacttacccgtcgaatgccacaacacagggagcgaataatgacgattgcagagcgaattcataatgatggatatataaaaggggagcagcgcattcttcgattgttgttgcagaatggggcggatcctgaatggatacaaaagattaccggactttcggcagagcaaatgcaggcattaaggcagcccttgcctgagcgtgagcgctattcatggctcaagagctaatcagagacggatgacaaacgcaaagcagcctgatgcgctatgcttatcaggtctacataacccattaaatatattgaactttaaagatttttgtagacctggtcaggcgttcacatggcatccggcatgaacaaagcgtactttgcttaattcaggctggaacgtggcgatgacccagcaaagataaaacgagtcacaggttatgcatgagaggaaatcaggcgcttcgccgctatttcgaatttattccattgcccgatacacggcctcgccaatttgcttcagtgcttcgcgataggtttcgctgagcggcaaagcgcagttgatgcgcagacaattacggtatttgccggaagctgagaaaatcgagcctgccgccacctggattttcatgcggcacagctgccgcgcgacgcagaccatatcgacctgttcaggcaattctatccacagtaaaaatccgcctttcgggcgcgtaatacagatttcgcagggaaaatattcccgtatccagcaggtataaagcgccaaattgcgctgatagatctgccgcatccgccggatatggcgatgatagtgaccttccagcacaaacgttgccgccgccatttgcgtggacggcacattaaagctgctgatggcgtatttcatatgcatcagtttatcgtgataacgccccggtgcgacccaacccacgcgcaggcctggtgcaatacttttactgaacgagctgcacaacagcactcgcccgtcgatatcccaggaatgaatggtccgcgggcgcggatactccgtcgccagttcgccatagacatcatcttcaaaaatcacaatatcatgacgctgagcgagagagagaacggcccgtttgcgcgcgtccggcataataaatcccagcggattattacagtttggcaccagaatgatgcctttaatcggccactgttccagcgccagttccagcgcttcaacgctgatgccagtttctggatcggttgggatttcaatcactttcacgcccatgccgcgcagcatctgcatcgaaccgtaataacagggggattcgaccgcgacaatatcgcccggtttacacactgccattaacgccagcgacatcgagttatggcagccgctggtgatgatgatgtcatcggcggtgaccaccgagccgctgtcgagcatcaggcgggcaatctgctctcgcaatactcgctgaccggctaacaagtcataaccgagaacggtttgcagattatgctgcaccacccggcttagctcccgccacagcggtttcaggctgggcgcttcgacatccggtgtgcttttgcttaacggaacaatggaactgtcgctatgcgcctccagcatatccagcacctgatcccactgggtaatttccaccgggcgctgcaccggacgcgtcatcggcggtactggcggctgggctttacgttgtgcgacaaaataacccgaacgcggctgcggagtgatgagcttcatcgtctccagcgtctgatacgcctgctgcacggtgctgatactgacgccgtgctcctgacttaagctgcgcaccgacggcaatttctccccgtgacgatacagcccttgctcaatccgttcggcaagcagagtcgccagatgttgataacgcgtcatgctgtattccttatgtggaccatacagagagaaaaaccggtacagatgaggctaaaaaaccggatgcagatgctgttttaacctgtctgtatgttaaataaaagtaatatttgaatctgtattgtgaactgccagaaggtggatgatgaagcctctgaaagatgaggaggtagcagatggaatttcacgaaaacagagctaaagcgccgtttatcggcctggtgcaactctggcaggcggtgaggcgttggcggcggcaaatgcagacccgacgcgtgttacagcagatgagtgatgagcggttgaaggatatcgggttacgcagggaggatgtggagtgaggggggatatagatttatatataataaaacgtttttatgtttttaaattaagttataaaaattttcccgagacaattcatcaataggtatggagtgtacaggaatatcttcttcactaacctctttaaactcatgtcgataacggtcaaaaaacgcacagtgattacttgtgttttttgactgactttacaactctcattattcgctattgtgcagtttctctaattgttttataccctggaaagttaaatgtcagctactgaatactttttgattgtttgagatttattttcatttgaaattataaaatcaggtgataaatgagttgtgattaatagatggttgatatcatttttatctaaaattgatttatagtatcgacctgaaaaaatagttgttgccgcctgagtaactatacaatattctgaaaggttttctttcaaattagaaatgttgtggggttttgtttttgtatcttttatctctaaggagcttgctttgggtcaatcagaatacatttcatgggtaaaatgtacttcctggctaagtaactttgtgaatcttagagggttgagacaaccggatggccgtcctctttatgaatatcatgcaaccaatgatgaatatacccaattaacgcagctactccgtgcagtcggtcaatcacaatctaatatatgtaatagggactttgctgcctgttttgttcttttttgctctgagtggtaccgcagggattatgaacggcaatgcggatggacgtgggaccctatatataaaaaaatagggatttcattcaccgccacagagcttggtactatcgtaccgaaagggatggaagattactggctgcgcccaattcgattttatgaatctgaacgacgcaattttctcggaacattattcagtgaaggtggtttacctttccggctactcaaagaatcagacagtcgctttctggctgttttctccaggatccttggacaatatgagcaagcaaagcagtcaggtttttctgccctttcgctggcaagagctgtcatagaaaaatcagcgctgccaactgtttttagcgaagatacctctgtagaacttatcagtcatatggctgataacctcaattccttagtacttactcacaacctaataaatcacaaagaaccagtacaacagcttgagaaggttcaccctacctggcgaagcgagtttccaataccgttagatgatgaaacaggaacgcattttttgaatggactgctatgcgcagcctctgtagaggctaagcctcgactacaaaaaaataagagtacgcgttgccaattctattggtcagaaaagcatccagatgagcttagggtgatagtatctcttccggacgaagtttcctttcctgtaacaagcgagccgtcaactacgcgctttgaacttgccatttgtgaagatggtgaggaagtctctggccttgggccagcctatgcttctctggaaaacagacaggcaacagttcgattacgtaaaagcgaagtgagatttggcaggcaaaatccatcggcaggtttgtcgttagtggctcgtgctggagggatgattgttgggagcattaaacttgatgacagtgaaattgccattggtgaggtgccgttaaccttcatcgttgatgcagatcaatggctgttacagggacaggcttcttgcagtgtgcgaagcagcgatgttctgattgtgctccctcgggataatagcaatgttgctggttttgatggccaatcgagggcagtaaacgtattaggactaaaagcactacctgtgaagggatgtcaggacgttacagttacagcaaatgaaacttatcggattcgcaccggaagagaacaaatcagcatcggaaggtttgctctaaatggaaagcgtgcaagctgggtttgtcatccagatgaaacatttattggtgtaccaaaagtcatttctacactaccggatattcaaagcattgatgtaacgcgttacacgtgctgacaaaacagcattacagccagcaggaagtactgcgttggatcgatgtctgttcagggactcaacctaatgcaaaggatcccgcatttcttaaagtcagggcgcatatcttccagcgtaatacctagggaatatgggcttgtgttgataaagattgcagattaaagcacggtacaccgctcgacaaaggctggccctttggctatgtgtatgtgaaccagcgacaaaattgtgactgtggaagccctgtatacgaagttgcattctgtaatgattgtaatgagcctcatcttctggcacgggacaaaaagggcaaactagtccagtgggaaaataaaggtggcgatgaattctctttgcaggatgaagtacctgttgaacatgacgctacagaagaaaaagtcgaaaaagagaacagttttcagcctccgttgattattgccgcaggagagaccagcgaggcaggttataccctacaacgcctcgaccgtcagacgcgccgtattggcgttattaacaatgacagcattccgctgattattaatgatattgaacaggtttgtagtgccagtggctgtggctacagaggcatgagtgggaaacagcccttccggcgtgcactattaggtgggccattttacgttactaatatcgtgcccaccgttctagagtattgtcaggactttaccagtgatgaaggcaaagagggcgtcggaccagattcgttgccaggacgaggtcgtcgactcatcacctttacagacagtcgacaagggacagcccgaatggcggtgcgtatgcagcaagaagcagaacgcagtcgcttacgcggaagcgtagtcgaaattctcagctggcatcaaaggacgcaaacgtctacagcgccgaatgccaatgccgatctggaaaaattagcggccagggcgaagcaagcccgtgagcaggcagaagaatatcgaagctggggaatgccagaccaggcgaaattgtcacaagcacaggctgaacagcttgaacaggcttatcaggctgcaaccggtgggaaagccgcgactatcctggtatcccgaacctggacggagatggttaacgagcttaaagagagagccgatatccgcgggccggttctgcaatataaccattatcttaagcctgaagtgtttaatgaaaacggcggcccccttaagctttctgaaatgttgttgttccgggaattcatgcgtcgccctaaacggactaacagcctggaaacacaggggctggttcaggttggttaccaggggctggagaaaatacataagagccccttgcactggcaggaaaaaggattaacgctggatgactggcgcgattttctcaaggttacgttggatcattacgttcgcgagagcaacttcacacagctggatgatgagctgaaaaactggattggtagccgtttttcatcaaaattcgtccgtaacccggaatcaaaagatcctgaagataatcagaacagacgctggcctcaaattcgtaatggcaacgtatcccatcgtttagcgaagttgctgatgctgggggctggattcaaaaccgtcaatgcggcaactattgatattatcaatacatggctgaaagaagcatgggcccaacttaccggaccgcttgcagtactgaaacccgatggcaaccgtttttatttaccgaaaggagcatatgactttttctttaatcacggatgcctggatttgcccggtaaccaataaaatcctggatacggcttttaaaggcttaaccccttatctgcctacccatatttcgttcgagcatcttaccctggcgcaatatgacacttttgtcgcgcagaaagtcacaatgccggaaatctggaagctggatcgttcacaggaagactacgcagagggtctggcaaaagcacgcgactgggtcagccatgatccgctgatcgcacaattgcggtcggaaaacgtctggacagacattaacgatcgtgtcgtggaaggcggcttctactatcgtactgccgagcactctgcccagcagtcgtcagaacgtctgcaaagctatgaaaagatgttcaagaatgggcaactaaatgttctcaactgttccaccaccatggaaatgggggttgataccgatcgcgtgatgacgctggcctctcgcagccagcaggcaacgattccggggccggagtggcacctgaatgacgaactggtggtgcgtagtctcggttataaaacggtagaactgaacgagtttattctgccggctaaagccaccaacgctgtcgagcgggtcaaagacattcagatccacaaacagttgaatggaccactgtcgcagtttgggcaacgcttctgggacgtgctgtttaacgaccatgaagaagcgcagtcactgatgaataacacgcgaattaccggcgttcactataccgatcgctatctgcaaaacccggttgcgctggcgttgttgggatcaattctgagaccgctaaaaacaaagctgaccgatggcgctgaagtgacgctggatacgctatttaaagataaagatcgccccggtaaccggcctttccatgactggatgagcatagcggattttcaggatttcgctgatcagtggtttgctgctgcgctgggcaggccggtagaactgacggtgttcgactcgccgcgcgatatccctcaccatcgtaaactgacggtgacttttgaggatggtcaggtattgaagatccgcttcgatcaggggatgggctactggcgcatcaacttttcatcgcaatggcattactttgatttccgcgatgacgtttctttccagttagtcaaaatggctcaggcctgcaaggaagggaatgtcgccaacagcgaagagagttgggcaacggatgtgctggtggaggtgatcgcctcctgatgatgagccgctcccgatgtggtgtcgggagcggtattttctataaaacttaccgcttatttgagatattcatcgaaaatgtcgagtaattcttgatgtatacacggccattcctgacctaaattgacggtacacaagccaatatcgaagccattaattttataacgatgtttcactgcggtatctacgtggggatatattaataacccccctatgttttcgccattttcaggctttaacgaccataagtaattcatcagttgataaagattttgcgaatgaaatttttctgttcccattcgtcgtgaaaaaatgctcttatagtatttggcgtcaacgataagtattttttctgatgagcgaatggtgatgtcagtttccattcgaggtaacaaattaagtgactgatccgatatactcgatgcatcccattttaaataagagcgggttgtgtttgcagacgttaattcacgacggcaaaattcataaagaaacttttgataaagtaatgacatctctttttcgtttctttcaaaatcatagaaacggtagtgtcctttgttttgacctggaatagaattattgacgatgaatttgcagacactgataacgaatttataataacgcgtattttttccgccattcagatagctgaaatgctgcggagttaaatgaagagtgctaatgcccggtaattttctataaagtgaacgagcttcatctctgatagttgaatttaacttttcatgcttaattaatatggctaatgtgctttttataattcggttagccagcgtgtcttcattaagcatatcaaaagtactgacggttttcccatgattaagatggaagccgcgtattgttttagcaaactctattcgccctttgatgccaggaatgatctcggtgttaggattgtaatcaagctcaagccctcggcgtgaaagctgtaaaacccctttatttaatacataccccaggatatcaagaagattgttaccgggtatggcttcaaggtttgcctgcttaatttcctgtaaataaccccatgcataggtaagcatgtaatagatattacggacaggtatcacgggctgttccactatgagtcccctaataatttgttggtccatttctgttgtttataggggtcatcaaagaaatattcttcgagtaaaggggcgatatccgtcatcacaatttcattaagccattgcgtatccggagaggtgccatcttccaacccacagcagaagtaactatgcccaatgcggaatcctttcccaaggatagtggcctctttgctgatttcctggttcaactcgttcattttttggcataaagactcaacaaatgaaggttctgcttttttattcagtaaaaaattccggaactgtggtgtatcaaaacctggctcaatatctatgaaagaaaatcgtctgcgtagggcatagtcaacaacggccagagagcgatcggcagtattcattaaaccgatgatataaacattctccgggacatagaatcgttcttcatcgttttcggagtaggttaggggaacagaccagttttcacctcgtttatcatgttccattaacatcatcacttcgccaaatactttactgagattggcacgattgatttcatctataataaaaatatactttttctctggctgctctttagcttgctgacaaaaattgtaaaatatgccgtctttacgtcggaagccgacgccattcggacgatagccctgtataaaatcctcatagctataagattgatggaactgaaccatattgacgcgttgcggagccttttctcctgtcagcaagtaagccagacggcgtgcaacaaaggtttttccaacgccgggcggcccctggaggataatattttttttgatggttaatcgtttgagtatcgtctctattgtggtttcagggataaacaaatcatttaacgcatcttccagacagtatgattcagtttttgacataggtggaataacactcttgccagaattaaatattaatttatagtcgttgattatgttgtccagcatagaggcaaatcgggtgtaatcaataccctgtgagactttttgggaacaggcgtaataggactgtccgtattttttaggatatacacccgaagttgcctgaaaatactctgcgattgttttaggtatgtctgaagagaactgccattgggcatgtggttcattcgtgtcgcttataccataagccaaaaccaactcatcaaaatctttataatagagaataacgggatatataccgttagaagcttcctgaccttctccaagaaatgcaaaccagggaatagacgtaaaattaccataaccgaaactcaattttactcgcaggttacggtaagacgttggataatctttagtggattgcgaacgttgttgctgtgcttgcttaataaatttttcaatccagggttgaatagattccataagatatgccttcctcattgctaagcctctattatcgctttcgcaacgtactgaaacaatagatttttactgcaaaatcagactggtaaatatttactgagggggaaagtttctattgagtcagtggaaggctcccggtggttaaccgggagtaaacgctgttacgcgactttctgtttaccggcaatcactccaataaacgcctgcacctgcttttgtttacgcgccgacagtttgcacacctggcgtagcgactgcatcagttcgctctcctcggcggcgggtggttgggcggtgaggacaatacagccttccatcactttgacatctaccgccgtgccagtggcaaaaccggcggcttccagccactgacctttcagggtgatggcgggaatacggctgtaatccgggtagcgactcgcataaccgacggtgacatgacggttatttgccggggagacttctgcttcgaacggttgtgcaatagaatgcgtgtcagtcataactgctattctccaggaatagtgattgtgattagcgatgcgggtgtgttggcgcacatccgcaccgcgctaaatacctgtatatatcatcagtaaatatggggaaagtccagctaaaaatagaataaaatgggcaatttctggaatgatttaaatatatttatgtgggttatgattggcgtgaaataataaaaagcgcaccggaaaggtgcgccagaaaataatgttcaggattttttacgtgaggcttttttacccccgctagctgcgcgttcagctttgattttttccagcaacgcggcggcgctgttttctccgctgatcaaatccgggttttcggcccgccactgggcggtaagttcaccacggaacgcttttgccaggatggattgcgtcaggttgttgacgcgggctaaggcgttgttgacctgtttttctatggtgtcggcgtaggcgaagagttgctcgacgcggcgaacgatttcggcttgttcttttactggaggtaataaaacaacttgggatttgatatcttttcctgaaatacctttttgaccagaagttgttttcacgcagttcatcattgcatttcgtgctgagggggatgaaaaaaatatttcgatatattctggtaaagcatctttggttaatcgagctcgaataagtttatcaggatatagcaaattttgatgttgtaattttttcaataacccacaaacaccaacaaattctaaacttccgttatagcgagtaaataaaagatctccatcttgtaatttgtggcggtttagttcactttctgaacattctagaaaccgaatatcgttttgatctacatggccagcacgtacagaactaatgcgtagtattggatgaccaacaccactttcatttggctttgatgaaagaccattacgtaattcagttaagatagattcaaaatttaacttcttaaatacagaatgttgcggctcaaaattacgccatttttctgtcaattttccattaactgcgccccccaataccgcttgacgaaaacgtttcaggatttgtgggatttgctcaaaacgtgctttggtgctgtctacctgcgccagcagcgtatcgagtttttcagcgatgattttttgttcggcaagtggtgggattggtatatttatcaaatcaaagcttgccggcttaatattattaatatttgcaccagcagaaagtgatgaaattttgtttcgataaagagaagattttgtgaaatgagcaataaaaccagaaaatataagtttttcaggacgtaatacaccgcaaaatgcgccgaaactacattcaaatggtagatgctgatgtgcggatttaccaactacggatttgctccctgatgacattgcaataacaatatcttcaggagatattttttgactttctttaacaagatttttaggaacaaaaaccaagtccgtagtatcaaacttgccattctgaatattgttcgcacggataagaggcaaataatcatcttttagataatttattgcctgctcttttttatacgttactcctcggattagagttgtgaccgtagatactggggcgataacccacccctccggcaatttccccgcactcattccttcaccccaccaaacgcttcttccagcaactgacgctgcaaatcggcctcatcgctcgcccccagttcacgcatcagcgcatccagttcagacagcgcctgtaccagttcgcccatcgcttctgccgctaatacatccggctccggcaggctgtcggcatcaatactgtctttatctttcagccaggagatatccagcgaatcggattttgcggtgcggatccactcacggctgaacttgcgccagcggctggtagcaagatgctggtcggtgtttttgttctcttcgctgtcggcaacttccgtctcttcggcgttaaaactccattcaccttcagtgcgcgggcttaaaccgtgcgggtcttcgccatacacgcgctcaaacggctgcaaatgctcgtcggtaaacggtgtgcgcttgccgaaactcggcatattggtacgcaggtcatacacccacacatcatcggtacagttcttatcctgattcgggttcgccaccgtccctttggtaaagaacagcacgttggtcttcacgccctgagcgtaaaaaataccggtcggcagacgcagaatggtgtgcagatgacacttatccatcaggtcacgacgaatgtcggtgcctttgccgccttcaaacagcacgttatccggcaccaccaccgccgcacgaccgccgggatgcagcgtttcgataatatgctgcataaagcacaactgtttgttgctggtcgggtgaacaaaggtgcgggtaatgttggtgcctgcggcgctgccaaacggcgggttagtggcgacaatatgcgccttcggcaggttttcaccgtcgctacccagagtgttgcccagacggattgcgccgccgtggtcgaggttgccttcaatatcgtgcagcaggcagttcatcagtgccagacgacgggtgccgggcaccagttcgaggccgataaacgcgcggtggatctggaaatcctgcgtgtcgccatcaaggtcgtccagatcattggtttgcgacttaacatagcggtcggcttcaatcaaaaagcccgccgtacctgccgccgggtcctgcaccacttcacgcggctgcggtttcagcagatgaataatggttttaatcagcggacgcggggtgaagtactggcctgcaccagacttggtttcattcgcgttcttctgcaacagcccttcgtacatatcgccgaagtcatcgcgcgacttaccgtgcgcgccgttgtaccagtccagcgaatccatattgctgaccagtgcggttatttgtttcggctcggtgatggtggtactaacattatgaaaaactgcctgtaccagctttttgtcatcttcgcctaaatgcacgagcatttttcggtagaactgcaactgctcctggccgatgcgggatttcaggtcatcccagcggtaaccttccggcaggtattccgcttcctgaccggtctctttacacattttcaaaaacagcagcgaggcgagttcattgacgtagttttgataggaaacgccgccatcgcgcaggttgtcgcacagcttccacagcttcgcgaccagatcgttattgttcattgtgagttccgtaaattaagcagcggcccaaattcatcgagccgcagaagaagaaattgccgagggtaatatacacaaaatcattcaggttgcatcaaggcggcaagtgagtgaatccccgggagcgtacagaagtacgtgaccggggtgaacgagcgcagccaacgcagaggcagcctgaaggatgaagtgtatacgtgtcaggccagctcgtcccagatataatcgctgaatttgcccagcagggtatcgagattatcgtcaaaggttctttgcagcatcgccttcccgccgcgacggtggaagttgccggttttgaagacatcgtcgtcgagcaccactttctctttcagcgcctgcgctaaacgatcgagccagcttaattgctcgctgctccagtcgttttcgcccttaatgcgcgtcagcgcgtgatcgacacgttcctcaaacggtttcagcgcatcgcccaccgcagcgcggcgaatatgaccaatcagccgggcggcgatatcttcattgcgcgtctctttccatgctttgcgcagggaagattcctcaaagtgctggcggtcaaaccactcctgtagctcgaccagccctttacgggtgagatcgcgcgggcgattaataactgcctgcaatgccggttgcgcgttcggggaacgttgcaccagcgagtcaaaggcttcgaggaaatcctgcggcgtgtcgtaatcaccgtacagcgattttacactcaccacttcatcgtcgatatcgaggaagatcggcgcatcattcaggttgttgatgtccgttttcagcttttccagacgggcgataaagccaggcagtttgttaaagacttcggcgctccagtgcggccctttttcccgcaggcgcgaggcgaagccgttaaagttcacgcccgccgcgtcctggcatagctcatccagacgacgcacctgtttatctatcgtttcgctgcggtcacggttaaacgtggccagaccgatgatacgctggagcttcgccaccagttgttcatggctgtgctcggcaaaactgcggccatccgcttcggtgattttataggtttctgaatcggtaatttcattgaccagcgtttgcagttccaccttcgggcgcaccaccaccggacgcatggtgtcgacgctctccagcgtgctgtagatatcgacacagtcaaaaatcttaaagctggttttattcacctccgggcataagcgcgtggcgcggcctttcatctgttcgtacagaatgcggctgcgtactttacgcaggaacacgatattacagatcgacggaatatcgacgccggtcgtcagcaggtcgacggttaccacgatattgggcagccgctctttattgaagcgggtgatcatggtctgcactttgcgcgcgtctttatcggcatcaccggtgatcttgatgatcgcgtcgtgctccagttgcggatactttttcttgaacgcggcacgcagctcttccaccaccatatcggcatgggcattggtgacgcagaagaccagcgttttttgcgatccggtcgggtcaagataattggtgagttcgttacagacggcgcggttaaacgccgggatcaccaggccacggttaaagtcggcgacttcaaaatcctgatcgtcttccagggtgtcattgatcacttctccctgcgggctgatgcgctctacctgctcgcctttggagagataaaccccctcctgcgcgttgcgggtgatgatctgaataggcggatcctggtcgatcagaaaaccgtcgataaccgcggtacggtaggtataacggtaaaccggctcgccgaaaatctgcacagtatgtagcgccggggtggcggtgagagcgatttttaccgcatcgaagtgatcgagaatgcgacggtaggcagagacgtaatccagctggctgcggaactgcagttcgccttcggtctgctctttatcgagaatatagccgcgatgcgcttcgtcaacgacgatacagtcgtaacgggccaccggcatcggttcatctgattgcagggtgcgtttcaccagcgactgtacggtggcaacgtgaattttggtgctgtcttccgggaatttatccgtcagccctttaatgtcgaaaatgctgttgaaggtgtcgccgttaatacgcgtatcttcaaacgcgcccagcgcctgttcgccaagagaacggcggtcgacaaggaagagaatgcgtttaaaacgctgggactggatcaggcggaacatcatggcgattgccgtacgggttttaccggtaccggtcgccatcgccagcaggatctcttgttgccccttgacgattgccttttcaaccgcgcggacggcatcttcctgataataacgcaggcccagctcgctcatgccagggttatcggcaaaccactgattctgtttttgcggttcgctgccgagcatttccagcagctcttccgggcggtgccactcgggtaaggctttcgacatattgcgggtatcacgcacgtcgcgataccagatgccgcttttggtcttcattgttgcgcggtattcgcgcccgttggtcgagtagcagaaggggattttaaaccgttgtttgccgctggtgtcctgccagctggtttcatactctggcactgcttcatgcacttcatccggtgagtagtgctcaagcaaggtttcccgcaggaagccattatcgaaacatttactgtagcgatacgactcattgagcctggcgggaacgtcgatattgttacgtttcgcctctaccaccgcgatgggtttgaggccgacaaacagcacataatccgcaaagccctgattacccgtttcatcttttccggtcggccattcggcaatggctttattgacgccgggttccggacgtgcgcctttggagaagcgcagggttttgctgtcggcctgccagcctgctttacgcagttgcgcatcaatcaggaagcgactctcttcttcgctaaggttgagtgtgcgcttgatggcctgatcggtaatttctttgtggtaagccttacgttcctgttcggtctgttttgccagttccgcgttcttctcggcgagctgtgcttccagtgccgcaaggcgagcctgggtttgcgcttcggtttcctgctgtttgccttccagaatggcgatatagccgttcagggcaaccagcttctgctgttgcgcttcgacttctgcctgagtctgcgctttttctcgcacctgctgttcaagctgttgttttagcgtcagcacttcctggtgatagaggttttcaccacgttccggcaacacaaacaccggcaccgggaagtcataatctttagtgaccagacggtagtaccagacagccaggcggaacccgagtcgcaggcacatctgggcatcgttgagatcgttatgatattcgtgcaccgcctggttaccaatgcggcgtaatttgtgaaatacagagaggatgttgtcatcaacaaaggcgattttgccgagttcacgcaggagatcgtgttgattctcacaaggggggatgttgagtaacagaccaagatgtttcgctgtggcttcgccaaacatacgcattttaatcagcgtcgtgttgggatcatccgggtagttattttccgccgcacaggcgatggcataagtgaagtcgttgacgcccttcaggaattcaaaattggatttattcatcattgttattaatccattgctgtgcgggcctgtccaaatatttaaggcccataacatctcatcttagctttctgtacctttccgggcaatgaccacggtcacagcaactgactcatttctaacgtgttcgtctatttttgtagtgctatagtagccgaaaaacatctacctgattctgcaaggatgtactatgacggttcctacctatgacaaatttattgaacctgttctgcgttatctggcaacaaaaccggaaggtgcagccgcgcgtgatgttcatgaggctgccgcggatgcattaggactggatgacagccagcgagcgaaagtcattaccagcggacaacttgtttataaaaatcgtgcaggctgggcgcatgaccgtttaaaacgtgccgggttgtcgcaaagtttgtcgcgtggcaaatggtgcctgactcctgcgggttttgactgggttgcgtctcatccccagccaatgacggagcaggagacgaaccatctggccttcgcttttgtgaatgtcaaacttaagtcacggccggatgccgtcgatttagatccgaaagccgactctcccgatcatgaagaacttgcaaagagcagcccggacgatcggttagatcaggcgctaaaagagcttcgtgatgcggtggctgatgaggttctggaaaacttattgcaggtttctccttcgcgctttgaagtcattgttctggatgttttgcatcgcctggggtatggcggccaccgtgatgatttgcagcgtgttggcggtactggagatggtggcatcgatggtgtgatatcgcttgataaacttggcctggagaaagtttatgttcaggcaaaacgttggcagaatactgtaggcaggccagaattacaggcattttacggcgcactggctgggcaaaaagcgaaacgtggggtgtttattaccacttctggatttacttctcaggcgcgtgactttgcccaatccgtcgagggtatggtgttggttgatggggaacgcctggtgcacttaatgatcgaaaacgaagtaggggtttcttcacgtttgttgaaggtgccgaaactggatatggactattttgagtgaaatatcaggccggatgcggctgcgccttatccggcccataaccccttacttcctcaaccccgcaaacgcagcccgaatctcttcctccggcagctggatcccgataaacaccatcgtgctatgcggtttttcatcgccccacggcctgtcccagtcggcgctgtagaggcgctggacgccctggaacagcaggcggttaggttcgccgtcaatccacagcatccctttgtaacgtagcagtttatccgccgactccagcagcaggttttccatcacgcgggaaacttcgctgatatctaccgggtaatccagttccaccacaatcgacgaaatatcgttttgtttatctgcgataaagtggaaacgcggtttggtgctgacgacgttttcttccagcataaaaccgttggtgttgaacagcaggcccagatcgatgtcgccgtgggtgacggtgtagaccggtgcgcgggcgttgatgcgcgccaggcgttcatgcagtttttctgcttcgcctgcgacgtcggttttggtcagcagaatgcggtcggcgtagccaacctgtgactgggcgatggtgaactggttcatctgctcatcggcatgtaccgcatccaccagcgcaatcacgccgtccagcagataacgctggcataaaacttcatgggagaaaaaggtctgaataatcgggccgggatcggccatgccggtgcattcaatgaccagacggtcgaactgaatattgcccttgtcgagattgtccagcaggtcgagtagcgcgtcctccagctcgttggagcgcgaacaacagatgcagccgttggtcagcgttttgatctgcgtggcgcggtcgccaatcagttgatcatcaacagagacttcgccgaattcgttttcaatcacggcaatcttgtagccgtgctgttcgttaagaatatggcgcagcagggtggtttttcctgcgcctaaaaaaccggtgagtagggtaactgcaatcgggttcatgctctctccattaacaacagcgcataccgcctttaccatcgccgccgtagcgcgcgttctggcgttcgcggaagaattcttcatagctcatgtacggcttgtcgggatggttggtcttcatatgctcgacgtagttgtcgtagtctggaatgccaatcaacatcttcgccgcctggccgagatatttttttgcctgtcctaagttaccaaacatagttcactctgataagaacaaagccccgccgaagcggggctaaacacggttagtggtgcgaagagatcttcacgccgccttccgggattggaacgtacggtgtttctttgtcagtacgtttgtcgctgttacgcaccgcaagccaggttttgaaaccgtagaagatgatgctgtacaccacaatcaggaacagaatactcagacctgcgttggtgtagttgttcacaacgatgtggttcatattggcaatctgctgcgccgtcaggtcagtaccgttagcaatcttctctttgtactggcttgccatgtagaagaagccttccatctgcgggttggtgctgaacagtttcaggcccagcgcccaggtggtgcagataagcagccatacagccggaacaacagttacccagatgtattgggtgcgcttcatcttaatcagcacaacggtgcccagtaccagcgctacggctgccagcatctggttggagataccgaacagcggccacaggctcttaacgccgcccagcggatcaaccacgccctgatacagcaggtagccccacagacccacacagcccgcagtaccgatgataccggcaaccagagaatcggtttttttcaggaacgggatgaagttacccagcaggtcttgcagcataaagcggccagaacgggtacccgcatccagcgcggtcaggatgaacagggcttcgaacagaataccgaagtgataccagaagcccatgtcagccatcggcagcactttgtggaacacgtgcgcgatacctaccgccagcgtcggcgcgccacctgcacggttcaggacagaaggctcaccaatgtctttcgcggtttgcaggatctgctctggcgaaatcacgaagccccaggagctgacggtcgctgccgcgtgtgcggtaacgtctttcagctgcgccatgatgatcggcgcgttctcgccacccatttcatgcaggttaggcatggtgatgccaaggccagcaggcggggtgttcatcgcgaagtaaagacccggttcgatgatggacgcagcaaccagcgccataatcgccacgaaggactccatcagcattgcgccgtagccgatgaaacgcgcgtcggtttcattagccagcagttttggcgtcgtaccggaagagatcagcgcgtggaagccagataccgcaccacaggcgatggtgatgaacaggaacgggaacagagcgcctttccacagcgggccagtaccgtcaatgtactgggtcatggcaggcattttcagttccgggttcagcaccacgatacccagcgccaggccgacgataacgccgattttcaggaaggttgccagatagtcgcgcggtgcgaggatcagccacactggcagcagtgcggaaacaaacgcatagccaatcagcgcgaaggtaatggtggtgtctttaaaggtcagtgccggaccccagtacggatcgtgagcaatcacgccaccgaagtagatagaggcaaccagcagcacgataccaatgacagagacttcacccacacgccccggacgaataaagcgcatgtagatacccataaacagcgcaatcggtacggttgagcaaacggtgaagacaccccacggactttcggccagggctttaaccacaatcagcgccaggacggcgaggatgatgatcatgattaagaaacagccaaacagcgcgatagtccccggtactggtcccatctcttctttgatcatctcaccaagagatgcgccattacggcgagaggagataaacagcaccataaagtcctgaaccgcaccggccagcacgacccccgccagcagccacagcgtgccaggcaggtagcccatctgcgcggcgagaaccggacccaccagcggaccagcaccggcgatagcggcgaagtggtgaccaaacaacacgtaacggttggtcggaacgtagttcagaccgtcgttgttaataaccgcaggcgtcgcgcgcgtggggtcgagtttcatcaccttctgggcgatgtacagactgtagtagcgatacgccaccagatacaccgatacagaggcgaccacgatccacagggcgctgatgtgctccccccgacgtaatgcaactaccgcgaggcagaatgcaccgatgattccgagaatcacccagggtatgtgcttgaatatctttttagtatccatagtaaaacctggcatgtattgattaatagttggccgaagccgttctaggtttgcgttgcgtttgaggaggtaaattgaccgctatcctgtagtgatgttgccagagttacgcgcgcgtaaagtaaggtaaataactgagtggttattttagggatgtaagcggtcagttttgcggttgagcggcaaaggcgtcgtttaagtgacgataaatatgtgattcatatcacatatttatattgtgaataatttatgtaaataatggctttttaaattcagagtgtgaataaaattcactcggcgtaatctccgcgggatattcataaagtttttcctttccaggccgaaaatcttgcatcggtccacaggaaagagaaaccatgttaaaacgtatcaaaattgtgaccagcttactgctggttttggccgtttttggccttttacaactgacatcaggcggtctgttctttaatgccttaaagaatgacaaagaaaatttcactgttttacaaaccattcgccagcagcaatccacgctgaatggcagctgggtcgcgttgttgcagacgcgtaacaccctcaaccgcgcgggtatccgctacatgatggatcagaataatattggtagcggttcaaccgttgctgagctgatggagagtgccagtatttcgctgaaacaggcggaaaaaaactgggcggattacgaagcgttgccgcgtgacccgcgtcagagcaccgccgcagcggcagagatcaaacgtaattacgatatttatcacaatgcgctggcggagctgatccaactgttaggtgcaggcaaaatcaacgagttctttgatcagccgacccagggatatcaggacggtttcgagaagcagtatgtggcttacatggagcaaaacgatcggctccatgatatcgccgtcagcgataacaatgcctcctacagccaggcgatgtggattctggtgggcgtgatgatcgtcgtactggcggtcatcttcgccgtctggttcggtattaaagcctcgctggtagcgccaatgaatcgcctgattgacagcattcgtcatattgcaggcggcgatctggtgaaaccgattgaggtggatggctctaatgagatggggcaactggcagagagtttgcgccatatgcagggagagctgatgcgtaccgtcggtgatgtgcgcaacggggccaatgccatctatagcggtgccagcgaaatcgccaccggcaataacgatctctcttcgcgcaccgagcaacaggccgcttcgctggaagagacggcagccagcatggagcaactgaccgcaacggtgaagcagaacgccgaaaatgcgcgccaggccagccatctggcgttaagtgcttctgaaacggcgcaacgcggcggtaaagtggtagataacgtggtgcagactatgcgcgatatctccaccagttcgcagaaaatcgccgatattatcagcgtaattgacggcattgccttccagaccaatattctggctttgaacgcggcggttgaggctgcgcgtgcgggtgagcaagggcgcggttttgcggtggtcgcgggagaagtgcgtaatctggcccagcgcagcgcccaggcggctcgtgaaattaaaagcctgattgaagactcggtggggaaagtggatgttggctctacgctggtcgaaagcgccggggaaacaatggcggagattgtcagcgccgtgacccgcgtgacggacattatgggcgaaattgcttctgcttctgatgagcagagccgtggtatcgatcaggttggcttagcggttgctgagatggaccgggtaactcaacagaacgccgcgctggtggaagagtctgccgctgccgccgccgcgctggaagagcaggccagtcgcctgaccgaagcagtggcagtgttccggattcagcaacagcagcgtgaaacatcggctgtggtaaaaaccgtgacgccagctgcgccgcgtaaaatggccgtggcagatagcgaggagaactgggaaacattttaatcgccatgaaaatgcccgataagcaaaatgttatcgggcataaggagattaatctttacgtgggtcgttgatcggctgacgaaccaggaagatgtacgccagtgcccccgctgcggtgacgcaaccgcagatgattagtgccagacggaatgagtgggtggtatcaacaataaaaccagtaatgatcggcgcaaaagaggcgcagatgaagctggcaaagttctggatactgcccaccgacgcagtcatgcgagaagcaactgcgacgtggatcaagccccagcaggatgttccggcaaagtgaatacagaacagtgccatgccaatcagcagaaccgccgtcatggatgttgtcgcttgtggtactatcagcgtaaaggcggcagaacagaacatcccggcaataatgcagatcttacggcttttaatcggagccattccccctttgaccagccagtcggtaacgtaaccgttgaccagcatcccggcagccccaaacaggaaagggatagccgccatcaaccctgtgctttttaaatccaggttataggctgtttgcaggtaaccaggaagccaggccagatacagccacgcagtgtagttgatgccactgaatccgagcatcattccccacattgtacggttacggaacaggctgcgccattcggcaaaactgagcggatctcggcgggcattgacgctacctgcattgagataagcttgctcaacggcagtcagttctacgtgctcgcggttgcgatagagcatataccagccgatggcgagaaaaatccccagtacaccaatggtaataaacatcccgcgccagcccatcaccagcatcatcgccgccagaatcggtgggcttacggcaacgccaatggtagaagctgcgttgaagaagcccatcgggcgtccgcgctctttgatgttgaaccagtcgttaatgacttttacaccgcatgggttcatcggcgcttcaccaatccccataccgatacgcaccaacacgaactgcgtaaagttgtgcaccatgccagacattgcctggaacagtgaccagaagaacatccccagtcccagcatcaggcgtgggcctttacgatccaatagtgggccgcaaggaagttgcgcaatcccgtaagcgagtgaaaacacggagagcaaagcgccgatttcggtggcacttaatcccaattcttcacgaatcgttaaatttgctaccgacagcgaactgcggtcgagataattgattaccgccgcaaaaaataataacaacatggcggtggtttgaatgcgtttaattcgggtactgcgttgaactaatccatctggtggcacgggaatatctgccgacgaagatggagtaaatgaagaacgcggatcgatggtgatattttctttttccacgccggactcctgtatttataattttaattgtttacgtaattgtgcattacgcaaggttgacattaacggcaggttaaagttttaggactttactaccgctcacaaaaacatttttagtcgactgattgtgagcataggtaagcgggaatttcccggtatttatcttttgataaaaccgtgcacccgctaatagtttgctgtttttaatccgtacttaatgagcataacgcgtgttctcattaatggatcgaatcattgattgtttagctgaattcaaatggttacggagcgcaagggtggcatcaaggtcactgcggcaaatcagagcgctgagaatggtcatatgctcatcgacggcaatgatattgcgctgtttaagatcgctttcgtcccattgatagtgaaaatgaaagatgactgagatgatctcaagcgattgatcaaaaaagatattgtcggcagctgaaagcagtaaggagtgaaaatctctgtcaagttgcgagaacatgcgaaagctattgccgatgttgtcacgcagtagccgatgacgttcgagcatggttttcgcctgcagccagcggggatcatgatcaggcaggttgagaaagtgctgaagtgaatgtgtttcgagcatttcgcgtagctcaaacagctgctcggcgtaggattgatcgaattgcttcatgctccactggccgcgcttttcgctgtgaataagattataacggccgaattttaaaagatattctcttactacaaccgggctgacacccgcggcccgagccagttgcagttcagaaaacgtttcccctgggcgtaactggcgctggtttatcatcgtgaaaaaagcctgctcaaacactttgttttgttcactcattgaagcggtagtacaggcgaaaccgtcatcatggtcaggtttacgcgcaataacatagtcgtttccaacctgcgtcaagaccgcgcattcgcgtaagtggctgagaatatgacgcactgtggtgcggctgatgttgtacatttccgccagcgcactttgcgatgaagtggggaagggatatgaccccgcgccatatcatcaatgacctggttaatcacattgtggcgtaaattttgtgaacgactcatattttcctccttgtgagtccattaaaacccgatttaaaacatttttatgcgtgtgttttcacaaaaaagattttccgttccgctgccatttttcattttcattgatatctaaggcaacaaaaagtggagagccgaatcatgtctacgatgaatgttttaatttgccagcagccgaaagaattagtctggaaacaacgcgagatacctattccgggtgacaatgaagcattaataaaaattaagtctgtcgggatttgcggtaccgatattcatgcctggggtggaaatcaaccattttttagttatccacgtgttttaggccatgaaatatgtggggagattgttgggctgggtaaaaatattgctgatcttaaaaatggtcagcaagttgctgtgatcccttatgttgcctgtcagcaatgcccggcgtgtaaaagcgggcgtaccaattgctgtgaaaaaatttcagtcattggcgtgcatcaggatggcggttttagtgagtatttgagcgtgccggtggcgaacattttgcccgcagacggtattgacccgcaggcggcagcattgattgaacctttcgctattagcgctcatgcggtgcgtcgcgcagccattgctcccggcgagcaggtgctggtggtcggggcggggccaatcggtctgggcgcggcggcaatcgctaaagccgatggcgcacaggtggtggtggcggataccagtccggcgcgccgtgaacatgtggcaacgcgtctggaattacctttactggacccgtcagccgaagattttgacgcgcagctacgggcgcagtttggtggttcgctggcgcagaaagtgatcgacgcgacaggtaatcaacatgcgatgaataacaccgtgaatttgattcgtcacggcggcacggtggtatttgtcggcctgtttaaaggtgagttgcagttctccgatccggaattccataaaaaagaaacgacgatgatgggcagccgcaacgccacgccggaagattttgctaaagtcggtcgactgatggcggaaggaaaaatcactgctgacatgatgttaacccatcgctatccgttcgccacgctggcagaaacctacgagcgcgatgtgattaacaatcgtgagttaattaaaggcgtaattactttctgataaggcgagattattaaagttgccatgcagcgtccggggaagtgttgggcgctgttttttttgtttcttaataatgtgttgtaagccgtagaaggcgtgtaggtcgcaccctatgcgacctacacatcagtcaggaattacccttcacgttctaccactttaatttccaccatgccgatcccgagcttacgcggcgagtgtccgaggatattcccttcgttggttgagacaggttccggcggcacaattaccagtgtgtcggcatcggttgggttatcgaaatgcagtgtggtggtggtcacttcattgcccagcacaagagtttgttcttcattgcctacgcgtaccggaataggacggctggcgttattgccgtatgctttggcggtaatcaccaggtcaaatttcttcggcagcggatgcttgtactcgatttttacttcatcgcccagctgcgcgttggaccagcggccccacgactccggacgggaaatcccgctaaactgtttcacctcttctggcgcaccggcgacgttaaagatgaaactgtcggctttgtagcgaatatcgttatcaacaatcttcagcgtatcgacattgcctttgtaacgcgccatgtcgatgaccgtatctttaaatgccgttttgccctgccatgttgttttgtcaacatgctgaacaatttgctgaccgccaagctgcccttgcgagacacaccagtcggtggaaagtgccagttccggagcccagagttgtgccatcttgtagcaacggtcaacccagacgaaattgtcgcgtggagcgaaatcggccagctggaaacgcagcggtgctgagtattcgctttccggcagcggttccacgcgtttgtctgaaacccgcaacagcagcggcaaacggaaatggctacccgagaaggcaatcatgtttttctgctggtcgatggtgaactctttcatctctttagggaatttccacaggcggatgatatctggcttccacgccaatgttttctctttgatattgaggaagatttccgacatcgactgcccggataaactgctacgaccaagtccgagatagttatcgccaccgagaatgtccagcaccgtcgcgccgttatccatcgtgttacgcttcactgccagcgtctcttgctgcggcttgtcgccacgaatgacaaaaaacaggttattgcgatcctgcttattgaggtatttccacgccgtgttgttcatcgctaaatggtcagaagagacgacgatgacggtatctttaaaccacggtgacgctttgattttgttgataaacgtcgcgatgttctcctggctgcaacttaccgcgctgaatgactgattcggtttaccgtcaaaatcatattttttgcggttacaggtacgagagataaaaccatccgggtgatgggtatcgactgtcagggtaaacagtgagaatcgctgacctgagcgggaaagctcttcaaactttttccacgcttcatcgagaacggtatcgtcgtagaatccccagtcgttgcgatagtgcgggtcggctaccacgcttttcagctcttctgagccgtataagtggtcgaagccatgcgacttcaggaacacatctttaccggcaaaacgcagattcgcgccctgcacgaaatagttctgataacccgagtttttcaggatatctcccagacagatgttctgcgggaagaagctggagacagaggcggaggcgttgccttcaaagggggcaaacagcggtatgccgcactgagaagccaccatgcccgcaatcgtgtaatctgttcccggcagctgctgcgtgtggctgaaatccaggccttcatttttcaacgcgcccagttcaggcgtgagatccgggaaagcctcgttatcaaaataggtccgctcgagactttcgccgtagatataaaccaggttgagtttcgggtcagggatagttttcgacggctctttataataagccgcaaagtccgggtcgccgtcgcgtgactgggatttcaccagttccgttatctgacgaaatgccgggctggcgtccaccgaacccagcgccagtaagagcgccagcaggctgtaaccaaaatggtgcggatgatggcgacgacggcgcaggatccagcccagcgcaccgaacaccgctgtcagccccagcacaatgccgatacccggcaaaatgtatttgctgacgccagcaccggtcaggctgttggttaaggtatagagaaccgcgtcgttaataccatcgccagtaaaatagtcgctggcaaacagggtgatatttaaaacgacaaatagccccagcaccgttaacgtggctgcaaaccaccaggtgttacgtcccgctttccatgcgtaaatcagcacagaggcgagaaaaagggcgaaagagagtagttctgacaacgggcgatcctcactaaaccgggccgtttagccaacgtttaagctttttgagaagcacaatgtaatggcgtcgccatattgctgcaattctagtgtcaaaaaaatgcgatgttgttaggaattagtttataaacagacttttttgattacggtcacttcccgtgtaacaggggtaaaaccgtccaggagcagggaaaagggcaggagagagccgcgtcagccgggtaacagctaaaacgcggcgtttcgcggttcaggaaatgaagttcagcccctgttttaacaccagatcgcaggctttggttttcaccttttctgccagcggagttgttccgatgttatccagattgagttgctgaccatctttggttttcagcaaaccctgaatgccgtccagatagttggtgtcttctttttgctcttcactgttcaggcccagcttttccagcacctggttcttgatgttttcggcatcggttaccgacgccagcttttgcttcgcgcagtattgcagaatgcctgcggcattgttcatgttatctgcgcttaaggcctggtttccgctgctaagcaagttagttaatgacgcgagcgaccaaccgccttcctgtgtcgtgctgttttggttgccaagttcgctggcggcgctggagagcgcatctttccaggacgcagcatgcaccccggtggaaattaatgcgctggcggcaatggcacagcacagaagatgtttaacagttttcatcatcattactcaaggtggaattgtgtcgcagtataccgccagaaacggggattaatactctttacctgttacccggctacggtagctatcccagttgaagatcacccacaaactgttacccaggcgcatacggtccatcacgcgttcgcccagcaacttggtcatctcttccatattactgttggtcagcatcccggttgggcgtttggaagaagagcggcgatcgacgatctggttgatgatcactttttcgtatttcgattcggtctgcacgccgatctcatcgatcaccagcagatcaacgttgctcagatcgttaagcagttgttcttcgctggtaccgctattcctgaaggtatctttcatcgccgacataatatcggccacggtgatgatcaatacggatttaccgcgtagcagcagctcgttgcagattgccgccgccagatggtttttgccggttcctggcttaccagaaaagatgaagctggcgatgttgccgtcaaactcttcgacatactggcgcgctttgcttaacgcattcatctgcccttcacactcaacgcgatagttctcaaaggaacagttctgatgcagtggacgaataccggagcggttaaaggtgcgctgcattttcatcgcccgattttcacgttcgagagcggcggagcggatcgctccttgttctttttgccaggccagtagttcttcacccgttttgaatgcgggtttgatatgggcaggcatcattttttgcaggcgttgcatcaggtcgccaacgtttttcatcgttaccctctgaatcctggtggaatttggctgtcaggttcgctgaccgtattcacatctcgtttcggcagtccgccgttgctggcacgaccgatttgcaggctgcgcgccagtttttgttgccactgcacatggtgaaagactttaccttccgcctgccagtaggcaatgaatgaggccagttcttcggtggtcaccggctctcttagcgccacgccccatagcgccgccaggcggataaaatcggcatcgggttgccagtccggatacatggcgaatttccccatgggtacagcaacgggagcggcttgcggttcctgatagagttgatcgtccagagcgacatcgcttcccggacgcgccagcttttcttccagcgccagcagttcagccaggcgtgcaggcgtgacggcataaaacgccggggcattgttagcaaatacggcaaccacaccgccttcagcttttgccagaacggtttggtgatcgtgtaccagggcgtcaataccaacgacgtccggggtcaaaactctggaagacatactgtttctcaaatatggaacgatgaacgagaagggagataacttttatagtaacacacggaggagaggaggctgtctctcatccgtgtgcttaagcgaggcaattttatacgcgagggcgcttgcggtacaaccataatccaggaatggaaagaccgatggataacgcaccaacaatcgatgaagctgtaagaaagttggttaacagggtaatcatcaacggttcgctgtaacctaactggctgatttttaccgccgaaatcattgcggtataagccgatatgcccgggaacatagggataacggccgccacggtaaacactttcggatgcgccagataccagcgcgaccattgaataccaatggtaccgaccagcatagaagccataaaggttgaccactcaatattcaacccgctggtcatcaagatcattcgggaaccatgacctatcgagccaagcagcgcacaccagcgtaacgcccgcacgggaacgttgaacaccatcgcaaagccgaccgcaggaatggcggcgaggatcatatcctgcgccaacgctaacagaaattcgatcacacccatccgcgtagcccccaaatcgtcagtgccatcactacgccgacgcaggtagccagtgtcagcagactggcgatcgcccagcgtgccagtccggtattgatgtggcctttaaacatatcggcgacggcattaatcaacggaaagcccggcactagcagcagaacgctggcggccatcgcaatggtgggggtattgctgaaagtggggagttgcaaaagcaatccggaaatggtggtggcggcgaaagcggtaaggcaaaagttgatctgtggatgaagatgacgttgtgccagcagctggcggatatacatcgcggtcgtactggcaaagaaggtgatgacggcaccatcccagccaccgttattgagtttacagaaacaggcgcaagaaaggccaaccattaaggctaccagccatcttgggtaacgtaatggctgaatttggctaaatcgtttctctacgcctttgtaatccagcagatgatgctccgcaagaatcacaatgtgctggacttcagtcaccacatgcatattaatgccgcgatcgtgatttttacgtgtcgatgtcaggcattgcccatctttaatagttgtcagcactatggcgttcgaagagatagaactttcgacgctgtccattcccagtgcccgacccagtcgtgaggaaagctcatcaaccaacgcgctttccgcaccatgttgcaaaagaaataatccacactggatacaaagccgtgttacggctcgctgttgctcagtttgcataactcgccctttgtcatagacgtgctgcgtattgttcagataatgagaatccatttgtatcatgaagcacggttgttttgcggtaggttaagatcaaaattgcgctgattaatcctggttatcgggagaagctcggtgataaaaagcgaattatctctcgccgcaaacaaactatcacatgaatattatcatcataatgaatttattgtttggcctttacgaatcaggataatagataaccgggcacgttttttaatgttaacaagctaaaaccatcagatttcattgaataaatattggttgtgtgattttgcattctgcgggaagggatatcatttaattataaattaaatgaatgtgatttctgtttttcattaagtattcctaacaacttaatgtagatattttaaatgtctccaggctatttcaccaggttatcatttgatgctaaccttctgacacatgcagtggagttgttgtgcagcaggagtatgctgatatgaaagtgaatgctaaggataatttattcgcttaatctattaatttgctggaaacatttaaggaatgaatatcctgaataaaccatcataatttttagacagtggatgtggaggaaatatgttgccaggatgctgcaaaaatggaattgttatcagtaaaatacctgttatgcaagcagggttaaaagaggtcatgaggactcacttccctgaatatgaaataatatccagcgcctctgcggaggaccttaccttattacaattacgtcgttccggattagtcattgctgatttagccggtgaaagtgaagatccacgttctgtttgtgaacattattattctttaatctcacaatatcgggaaattcactgggttttcatggtgtcacgctcctggtattcccaggcagtagaactgctcatgtgccctacggcgacgttattgtctgatgttgaacccattgagaatctggtcaagaccgtacgttccggcaatacgcacgcagagcgtatcagcgccatgctgacctccccggcaatgactgaaactcatgattttagctatcgctccgtcattctcactctttcagagcgcaaggtactgcggctattaggtaaaggatggggcatcaaccagatagcttcattgcttaagaaaagtaataaaactatcagcgcccaaaaaaacagtgcgatgcgtcgactggcaattcacagcaacgctgaaatgtatgcatggataaatagcgcgcagggtgcaagagaacttaacttgccttctgtttatggagatgccgcagaatggaacacagccgaattaagaagagaaatgtcgcactcatagaaaaatgcgtcatgagtagtatcggtattgagagtttattcagaaagtttgcgggtaacccttataagctccatacctataccagtcaggagtcatttcaggatgccatgtcgcggatctcgtttgcggcggtcattttttctttttctgccatgagaagtgagcgcagagagggattatcttgcctgactgaactggcgattaagtttccgcgtacccggcgtttagttattgcggatgatgatattgaagctcggctgattggttcattgtcgccatcaccgctggacggtgtattaagtaaagcgtcaacgctggagatttttcatcaggaactctttttgtcattaaatggtgtacgtcaggcgaccgaccgactgaacaatcagtggtacattaaccaaagccggacgttaagcccgacggagagagaaatattgcgctttatgtcgcgtggctactcaatgacacaaattgccgagcagcttaaacgcaatatcaaaacgatccgtgcacataaatttaatgtgatgtcgaaactgggcgtcagttctgacgcagggttgttggaggccgcagatattctgttatgtatgcggcattgcgaaacaagtaatgtgttgcatccctattaatccgcatgatgccgggtttacttccccggcagtgctttcatttcagcgtacaatcgccacattgctgcacatccggtaagcgataacgctggcagcaagtgcggcgcaccagcaggccgtcgcgcagtaccacggtacgccagagtggattatcttcaccgttcgtgagcgttttctcaaaaaagagggcatggcgcagcgattcaacagtagcctcgccgagcagttgcttcatctcagtgagataccagttgatcaaataaccggtattactccagataagtttgccgttgatctctccggtcgcttctagtgcttgcacaaccggaaccagcgcctggctgattaacgtttccattcgatgctgcggcgaatgtggtgttgcgtttttatcttcacacacatcgacccagaaacaggcgacgcgtccggtttcgtgaaactcagcatggaaatgttccggcgacacatctaatgccttttcctgcgtcagtagcgccagcattaatggtggcaccatcaggccgatataccattgtgcccatagtgagatcagcggtttgttctcgcggatcatcatcggttggttgcgatagatatgatcggaatagaccgccagcagagaacttagcacattcggtgatgaccattgcgccagcgtcatggcgttaagtggggcaggttcatccaggcggataaactccagcaaatgttcacgatgttttgcgatcgtcgcccgcacggcttgcgcaagcgtgggatcctgcggctggagatgcgttcgccagatgacatcttcatagagcggtgcggaacgataggccataatcgggatagtaatctaaatgataatgattgctaatcatagcgataggtttacccgatagcaagggatttatctggcttgcaaatgataaaaattatcatatgatattggttatcattatcaatgaaagagatgaaatcatgttgcaacgtacgctgggcagtggctggggagtgttgctgccgggattgctgattgcagggctgatgtatgcggatttatcgtcagatcagtggcggattgtcattctgatgggattagtattgacgccgatgatgctgtatcacaaacagttgcggcattacattttgctaccatcgtgcctggcacttattgctggcatcatgctgatgataatgaatttgaatcagggatgaaaaatcaaggaagaaacaagaaaggaagtaaagataattggtgcgaggggggggacttgaacccccacgtccgtaaggacactaacacctgaagctagcgcgtctaccaattccgccaccttcgcacagtcatcttactttttttgatatcgcctcgtttggtgcgaggggggggacttgaacccccacgtccgtaagaacactaacacctgaagctagcgcgtctaccaattccgccaccttcgcccagtgcgagcaatatcaacgtggtttttggtgcgaggggggggacttgaacccccacgtccgtaaggacactaacacctgaagctagcgcgtctaccaattccgccaccttcgcataccatcaattcttaaaaagaattgctaccacggaggcgcattctagtggttttcagcttttcgtcaatagttaattatcgacagaggtgtaattgctggaaaaatgtccatcaggaaactagcgtgcaggtttggtatgcatgcgggggcagatgccagatgcgacgctggcgcgtcttatctggcctacgaagggctaacgtgcaggttttgtaggtcggataaggcgttcacgccgcatccgacacggtattcggcgagataattaacctttcttcgcctggcgggtcataatggcgcgatacaccttgaagcgccctgtttgcgcgatcacttcgtggaagccaaatgtctcatccagcacgtccggataaggcaggaaggcgttcgctacaattcgcagctcgccgccgctattaagatgacgcaccgcaccgcgaatcagcgtttgcgccgcatccaggctggtttgcatcccatcgtggaacggcgggttggagatgatcatatcaaaacgacctttcacctcggaaaagacgttgctggcaaagacttcaccttcaacaccgttggccgcaagtgttgcgcggctggcttctaccgccggggcagagacatcgcacaaggtgagacgaattttcggcgaatggcgcgcaaaggcaactgaaagcacgcccgcgccacagccgacatccagcactttacctttcgtgtgcggagttaacgtcgagagcagcaactggctaccgacatccagaccgtcgcggctaaacacgccaggcagcgttttgaccgtcaggccatcgacgctgtattcgccccagaatttctccgcatcaaataccggctgtttttccagacgaccaaaatagaggccacagcgacgagcgctgtcgactttattcaacggcgcataatctgccagcatctgctcggcgctgcgcacgccgctgcggttctcgccaacgacaaaaatatctgtccccactggcagcagagaaagtaaattcatcaactggaactgggcttccggtttgttcttcggccagtagtaaatcagcgtatcgcaatctgcgacgtcatccgccgtggcgaccagactgaaacgggcgttatcccccatctggcggcttaatacctgccagtggtggaattgctgggtatgagcacggctggccgcggtatctaaacgcgcgggcaggtcatcctgtaagtctccggcaaacagaatacggctttgttcgaaatcatcactgtgacgcagcaagacttcacttgccggggtaaatgcagacatggaatgctcctcaattgatactggcggcgattatagccatatgttggcgcggtatcgacgaatttgctatatttgcgcccctgacaacaggagcgattcgctatgacatcccgacgagactggcagttacagcaactgggcattacccagtggtcgctgcgtcgccctggcgcgttgcagggggagattgccattgcgatcccggcacacgtccgtctggtgatggtggcaaacgatcttcccgccctgactgatcctttagtgagcgatgttctgcgcgcattaaccgtcagccccgaccaggtgctgcaactgacgccagaaaaaatcgcgatgctgccgcaaggcagtcactgcaacagttggcggttgggtactgacgaaccgctatcactggaaggcgctcaggtggcatcaccggcgctcaccgatttacgggcaaacccaacggcacgcgccgcgttatggcaacaaatttgcacatatgaacacgatttcttccctcgaaacgactgatttaccggcggcttaccacattgaacaacgcgcccacgcctttccgtggagtgaaaaaacgtttgccagcaaccagggcgagcgttatctcaactttcagttaacgcaaaacggcaaaatggcggcgtttgcgattacgcaagtggtgctggatgaagctacattgttcaatattgcggtcgatcctgactatcagcgtcagggattgggaagggcgctgctggaacatctgatcgacgaactggaaaaacgcggcgtggcgacactatggctggaagtccgtgcttcaaacgctgccgccattgccctgtacgaaagtttaggctttaacgaggcgacgattcgccgcaattactaccccaccacggacggtcgcgaagacgccatcatcatggcgttgccaatcagtatgtaatacaaggtggaataatgaagtgggactggattttctttgatgccgatgaaacgctgtttacctttgactcattcaccggcctgcagcggatgtttcttgattacagcgtcacctttaccgctgaagattttcaggactatcaggccgttaacaagccactgtgggtggattatcaaaacggcgcgatcacttcattacagcttcagcacgggcggtttgagagctgggccgaacggctgaacgtcgagccaggtaaactcaacgaagcctttattaatgcgatggcggaaatctgcacgccgctgccgggcgcggtttctctgcttaacgccattcgtggcaacgccaaaatcggcatcatcaccaacggctttagtgccttgcaacaggtgcgtctggaacgcacgggcctgcgtgattacttcgatttgctggtgatttccgaagaagttggcgttgccaaaccgaataagaaaattttcgattatgcgctggaacaggcgggcaatcctgaccgttcacgcgtgctgatggttggcgacactgccgagtccgatattctcggtggcatcaacgccgggcttgcgacctgctggctgaatgcacaccatcgcgagcaaccagaaggcatcgcgcccacctggaccgtttcttcgttgcacgaactggagcagctcctgtgtaaacactgattgcctcccccccgttgatgggtaaaatagccgcaatttttcgttttcaacaagcgcggcgcgatgccgcttactcaagaagaaagaattatgacgttgtctccttatttgcaagaggtggcgaagcgccgcacttttgccattatttctcacccggacgccggtaagactaccatcaccgagaaggtgctgctgttcggacaggccattcagaccgccggtacagtaaaaggccgtggttccaaccagcacgctaagtcggactggatggagatggaaaagcagcgtgggatctccattactacgtctgtgatgcagtttccgtatcacgattgcctggttaacctgctcgacaccccggggcacgaagacttctcggaagatacctatcgtaccctgacggcggtggactgctgcctgatggttatcgacgccgcaaaaggtgttgaagatcgtacccgtaagctgatggaagttacccgtctgcgcgacacgccgatcctcacctttatgaacaaacttgaccgtgatatccgcgacccgatggagctgctcgatgaagttgagaacgagctgaaaatcggctgtgcgccgatcacctggccgattggctgcggcaagctgtttaaaggcgtttaccacctttataaagacgaaacctatctctatcagagcggtaaaggccacaccattcaggaagtccgcattgttaaagggctgaataacccggatctcgatgctgcggttggtgaagatctggcacagcagctgcgtgacgaactggaactggtgaaaggcgcgtctaacgagttcgacaaagagctgttccttgcgggcgaaatcactccggtattcttcggtactgcgctgggtaacttcggcgtcgatcatatgttggatggcctggtggagtgggcacctgcgccgatgccgcgtcagactgatacccgtaccgtagaagcgagcgaagataaatttaccggcttcgtatttaaaattcaggccaacatggacccgaaacaccgcgaccgcgtggcgtttatgcgtgtggtgtccggtaaatatgaaaaaggcatgaaactgcgccaggtgcgcactgcgaaagatgtggtgatctccgacgcgctgacctttatggcgggtgaccgttcgcacgttgaagaagcgtatccgggcgatatcctcggcctgcacaaccacggcaccattcagatcggcgacacctttacccagggtgagatgatgaagttcaccggtattccgaacttcgcaccagaactgttccgtcgtatccgcctgaaagatccgctgaagcaaaaacagctgctcaaagggctggtacagctttccgaagagggcgcggtgcaggtgttccgtccaatctccaacaacgatctgatcgttggtgcagttggtgtgctgcagtttgatgtggtggtagcgcgcctgaagagcgaatacaacgttgaagcagtgtatgagtcagtcaacgttgccactgcccgctgggtagaatgtgcagacgcgaagaaattcgaagagttcaagcgtaagaacgaaagccaactggcgcttgatggcggcgataacctcgcttacatcgctaccagcatggtcaacctgcgcctggcacaggaacgttatccggacgttcagttccaccagacccgcgagcattaattcttgcctccagggcgcggtacgcgctgcgccctgtcaatttcccttccttattagccgcttacggaatgttcttaaaacattcacttttgcttatgttttcgctgatatcccgagcggtttcaaaattgtgatctatatttaacaaagtgatgacatttctgacggcgttaaataccgttcaatgcgtagatatcagtatctaaagccgtcgattgtcattctaccgatattaataactgattcagaggctgtaatggtcgttattcatcactcatcgcttttgtgatggcgaccattgacttctgtagagggtgaagtctctccctattcagcaatgcaacctcgtgttgccaggctcaaattacgagcaaacatacaggaataaatcgatgactatgacaagactgaagatttcgaaaactctgctggctgtaatgttgacctctgccgtcgcgaccggctctgcctacgcggaaaacaacgcgcagactaccaatgaaagcgcagggcaaaaagtcgatagctctatgaataaagtcggtaatttcatggatgacagcgccatcaccgcgaaagtgaaggcggccctggtggatcatgacaacatcaagagcaccgatatctctgtaaaaaccgatcaaaaagtcgtgaccctgagcggtttcgttgaaagccaggcccaggccgaagaggcagtgaaagtggcgaaaggcgttgaaggggtgacctctgtcagcgacaaactgcacgttcgcgacgctaaagaaggctcggtgaagggctacgcgggtgacaccgccaccaccagtgaaatcaaagccaaactgctggcggacgatatcgtcccttcccgtcatgtgaaagttgaaaccaccgacggcgtggttcagctctccggtaccgtcgattctcaggcacaaagtgaccgtgctgaaagtatcgccaaagcggtagatggtgtgaaaagcgttaaaaatgatctgaaaactaagtaattcgtcgtaattcgtcctcccgaactttgtcgggaggcgcgatgtgcaccacactaaaaatatcgcattgagtgattttcacgctcatatcaagcggtgacattaactatggtaaaggagacgcttatgtttcgttggggcatcatatttctggttatcgcgttaatcgccgccgcacttgggtttggtggtctggccggtaccgctgcaggcgcagctaaaattgtctttgtcgtcgggattattctgttcctggtgagtttgttcatgggccgaaaacgaccctagatttcagaccattaagaaaattttatccaaagccagtccagcggactggcttttgcggttttagcgaataataaattgcgttactttgtcattctttcacaacaaaaacaggaaggcagaggtggggcagcgaatacctgtaacgcttggtaatattgcgccgttgtcgctaaggccgttccagcctggacgaatagctctggtgtgcgaaggcggcggacagcgtggaattttcacggctggcgtgctggatgagtttatgcgcgcgcagtttaatcctttcgatctttatctcggcacatctgccggggcgcagaacctctcggcgtttatctgcaatcagcccggttacgcgcgcaaagtcatcatgcgctataccacaaaacgcgaatttttcgatccattgcgctttgtccgtggaggaaatcttatcgatctcgactggctggtggaggccactgcaagccagatgccgttgcaaatggataccgccgcgcggttgtttgacagcggcaaatcgttttatatgtgcgcctgtcgtcaggatgactacgcgccgaattactttttaccaaccaaacaaaactggctggatgtgattcgcgcctccagtgcgatacctggcttttatcgtagcggagtgtcgctggaaggcattaactacctggatggcgggatcagtgatgcgattccggttaaagaggcggcaaggcagggcgctaaaacgttggtcgtcattcgcactgtgccgtcacaaatgtactacacgccgcagtggttcaaacgcatggaacgctggctgggtgacagtagcctgcagccgctggtcaatctggtgcagcatcatgaaaccagctatcgtgacattcagcaatttattgagaaaccaccgggcaagctgcggatattcgaaatttatccgccgaagccattacatagtatcgcgcttggcagtcggattccggcgctgcgtgaagactataaacttgggcgtttatgcggtcgttatttcctcgccacggttggcaagctattaactgaaaaagcgccgcttacccgccatctggtgccagtggtgacgccggaatcgattgtcattccgcctgcgccagtcgccaacgatacgctggttgccgaagtgagcgacgctccgcaggcgaacgacccgacatttaacaatgaggatctggcttgatttgccgttttatcgacacccactgccattttgatttcccgccgtttagtggcgatgaagaggccagcctgcaacgcgcggcacaagcgggcgtaggcaagatcattgttccggcaacagaggcggaaaattttgcccgtgtgttggcattagcggaaaattatcaaccgctgtatgccgcattgggcttgcatcctggtatgttggaaaaacatagcgatgtgtctcttgagcagctacagcaggcgctggaaaggcgtccggcgaaggtggtggcggtgggggagatcggtctggatctctttggcgacgatccgcaatttgagaggcagcagtggttactcgacgaacaactgaaactggcgaaacgctacgatctgccggtgatcctgcattcacggcgcacgcacgacaaactggcgatgcatcttaaacgccacgatttaccgcgcactggcgtggttcacggtttttccggcagcctgcaacaggccgaacggtttgtacagctgggctacaaaattggcgtaggcggtactatcacctatccacgcgccagtaaaacccgcgatgtcatcgcaaaattaccgctggcatcgttattgctggaaaccgacgcgccggatatgccgctcaacggttttcaggggcagcctaaccgcccggagcaggctgcccgtgtgttcgccgtgctttgcgagttgcgccgggaaccggcggatgagattgcgcaagcgttgcttaataacacgtatacgttgtttaacgtgccgtaggccggataaggcgttcacgccgcatccggcagttggcgcacaatgcctgatgcgacgcttaacgcgtcttatcatgcctacaggtttgtgccgaaccgtaggccggataaggcgttcacgccgcatccggcagttggcgcacaatgcctgatgcgacgcttgtcgcgtcttatcatgcctacaagtctgtgccgaaccgtaggccggataaggcgttcacgccgcatccggcagtcggcgcataatgcctgatgcgacgcttgtcgcgtcttatcatgcctacaggtttgtgccgaaccgtaggccggataaggcgttcgcgccgcatccggcagttggcgcacaatgcctgatgcgacgcttgacgcgtcttatcaggcctacaagtctgtgccgaaccgtaggccgtatccggcatgtcacaaatagagcgccggaaatatcaaccggctcaccccgcgcacctttaacgcatcagccaacggctcaacgtcttccggcgtggcgctcgcccagctttgcgcctcgccatacacgccgtgggcatgaaacgcgttcaggcgtaccggaacatcgccgagtcccttgataaacgccgccagttcttcgatgtgttgcaaataatccacctggccagggatcaccagcaaacgcagttccgccagcttgccgcgctctgccagcaaatagatgctgcgcttaatctgctgattatcgcgtccggtgagttgttgatgacattcgctcccccacgctttgagatcgagcattgcgccgtcgcacaccgggagcaatttttcccagccggtttcgctcaacatgccgttactgtccaccagacaggtgagatggcgcagttgcggatcgtttttgatagcagtaaacagcgccaccacaaacggcagctgggtcgtggcttcaccgccactcaccgttatcccttcgataaacagcactgctttgcggacatggctaagcacttcgtccacgctcatggattgcgccatgggcgtggcatgttgcggacacctcttcaggcaggtatcacactgctcgcaaaccacagcgttccacaccactttgccgtcaacaatctgcaacgcctgatgcggacactgtggcacgcactccccacagtcattgcaacgtcccatcgtccacggattgtgacagtttttgcagcgcagattgcagccctgcaaaaacagagccagacgactgcctggcccgtcaacgcaggagaaggggataatcttactgactaaagcgcatctgctgttcatggcttatcacgcgcggctggcgttccagaatacgagtgttgcgtgcggcttcttcgcccagccaggtggtgttggtgcgtgaaccttcggcgcgatatttttctaaatccgacaaacgcaccatataaccggtaacgcgaaccagatcgttaccgctgacattggcggtaaattcacgcattccggctttaaaggcaccgaggcaaagctgtaccagtgcctgcgggttacgtttgatggtttcgtcgagcgtcagaatgtcgctgatgccggaataataataagcatgatgcggggcgacagtttgcagatgggtgatcggatctggctcatcgccatacggcaaacgcgcgcccggcgtggtgccgatatcggaactgatccccgactgtgcgtgtaacatggcgcgtttttgccagccatatttcacgggggtattggcgacaaactccgccagttgcgcgctgatgcgataacctacttcatttgcggcggcttctttaccgtagcgcgcggcaatcccttctttttcacacagcaagttaaccgcttccgccagcccatacatgccaaacattggcacaaaacgttcagggttaatcagcccttctttcaccaggaagctattctcaaagaagtgtgattgttgatagaggaattcacaccgcgcatcgatgatggcgatctgctgctggcagtagtgcggtagagtgcgcgtaaagaagtcatccagcgattcgctgcgctcggcaatggctttcaggttaaggcgtaccagcgtgctgccaccacccgccagcggcagtgagttgtaacagctcacaatcccgtagcccccttttgtgaaaattttatcatgcaccggaccgttggcgatgtgcggtttgctacattcacagatgttcttcgccacttccagcagcaggtcatcaggggtgatttcaggatcgtagataaaggtcaggttcggtgaaacctgcttcaactctgcatctgcacgtaagatcgcgcgggtaatgggcgaatcagacgggccgatattggcgtgcataaaggcgtctggcagggttctgtcgaggtaacgccagaaacgttttattcgaacatcgatctcgtcttgtgttagaattctaacatacggttgcaacaacgcatccagttgccccaggtagaccggcatcgatgtgaccgacggtacgtggtggtaaagaatggtcagcagagagagtgcgtcatcaagatctttcgcgccttccagctccagccattcggaaccgttcgccagaaaacgggcgtaatcgggtaagacatagcgcggtttgtacggcgcatgaccttcaaacatatcgcagattacaccttcatccagcgcgcggcgggcttcggcaggaagctgtgggtaaggcagattgttttctgcttccagtgccagaaaatggcgcttctgctccgggctaagcactgggctggtgacaatttgctggcaacgttgttgcagtgcattttcatgagaagtgggcatcttcttttccttttatgccgaaggtgatgcgccattgtaagaagtttcgtgatgttcactttgatcctgatgcgtttgccaccactgacgcattcatttgaaagtgaattatttgaaccagatcgcattacagtgatgcaaacttgtaagtagatttccttaattgtgatgtgtatcgaagtgtgttgcggagtagatgttagaatactaacaaactcgcaaggtgaattttattggcgacaagccaggagaatgaaatgactgatctgaaagcaagcagcctgcgtgcactgaaattgatggacctgaccaccctgaatgacgacgacaccgacgagaaagtgatcgccctgtgtcatcaggccaaaactccggtcggcaataccgccgctatctgtatctatcctcgctttatcccgattgctcgcaaaactctgaaagagcagggcaccccggaaatccgtatcgctacggtaaccaacttcccacacggtaacgacgacatcgacatcgcgctggcagaaacccgtgcggcaatcgcctacggtgctgatgaagttgacgttgtgttcccgtaccgcgcgctgatggcgggtaacgagcaggttggttttgacctggtgaaagcctgtaaagaggcttgcgcggcagcgaatgtactgctgaaagtgatcatcgaaaccggcgaactgaaagacgaagcgctgatccgtaaagcgtctgaaatctccatcaaagcgggtgcggacttcatcaaaacctctaccggtaaagtggctgtgaacgcgacgccggaaagcgcgcgcatcatgatggaagtgatccgtgatatgggcgtagaaaaaaccgttggtttcaaaccggcgggcggcgtgcgtactgcggaagatgcgcagaaatatctcgccattgcagatgaactgttcggtgctgactgggcagatgcgcgtcactaccgctttggcgcttccagcctgctggcaagcctgctgaaagcgctgggtcacggcgacggtaagagcgccagcagctactaagtaagatgctttacgcctgatgcgctgcgcttatcaggcctacgagacgtatctacccgtaggccggataaggcgtagacgcatccggcaaaagccgcctcatactcttttcctcgggaggttaccttgtttctcgcacaagaaattattcgtaaaaaacgtgatggtcatgcgctgagcgatgaagaaattcgtttctttatcaacggtattcgcgacaacactatctccgaagggcagattgccgccctcgcgatgaccattttcttccacgatatgacaatgcctgagcgtgtctcgctgaccatggcgatgcgagattcaggaaccgttctcgactggaaaagcctgcatctgaatggcccgattgttgataaacactccaccggtggcgtcggcgatgtgacttcgctgatgttggggccgatggtcgcagcctgcggcggctatattccgatgatctctggtcgcggcctcggtcatactggcggtacgctcgacaaactggaatccatccctggcttcgacattttcccggatgacaaccgtttccgcgaaattattaaagacgtcggcgtggcgattatcggtcagaccagttcactggctccggctgataaacgtttctacgcgacccgtgatattaccgcaaccgtggactccatcccgctgatcaccgcctctattctggcgaagaaacttgcggaaggtctggacgcgctggtgatggacgtgaaagtgggtagcggcgcgtttatgccgacctacgaactctctgaagcccttgccgaagcgattgttggcgtggctaacggcgctggcgtgcgcaccaccgcgctgctcaccgacatgaatcaggtactggcctccagtgcaggtaacgcggttgaagttcgtgaagcggtgcagttcctgacgggtgaatatcgtaacccgcgtctgtttgatgtcacgatggcgctgtgcgtggagatgctgatctccggcaaactggcgaaagatgacgccgaagcgcgcgcgaaattgcaggcggtgctggacaacggtaaagcggcagaagtctttggtcgtatggtagcggcacaaaaaggcccgaccgacttcgttgagaactacgcgaagtatctgccgacagcgatgctgacgaaagcagtctatgctgataccgaaggttttgtcagtgaaatggatacccgcgcgctggggatggcagtggttgcaatgggcggcggacgccgtcaggcatctgacaccatcgattacagcgtcggctttactgatatggcgcgtctgggcgaccaggtagacggtcagcgtccgctggcggttatccacgcgaaagacgaaaacaactggcaggaagcggcgaaagcggtgaaagcggcaattaaacttgccgataaagcaccggaaagcacaccaactgtctatcgccgtatcagcgaataacggtatactgatctgatcatttaaatttgaagcactgagtacggagaacatatgaaacgtgcatttattatggtgctggactcattcggcatcggcgctacagaagatgcagaacgctttggtgacgtcggggctgacaccctgggtcatatcgcagaagcttgtgccaaaggcgaagctgataacggtcgtaaaggcccgctcaatctgccaaatctgacccgtctggggctggcgaaagcacacgaaggttctaccggtttcattccggcgggaatggacggcaacgctgaagttatcggcgcgtacgcatgggcgcacgaaatgtcatccggtaaagataccccgtctggtcactgggaaattgccggtgtcccggttctgtttgagtggggatatttctccgatcacgaaaacagcttcccgcaagagctgctggataaactggtcgaacgcgctaatctgccgggttacctcggtaactgccactcttccggtacggtcattctggatcaactgggcgaagagcacatgaaaaccggcaagccgattttctatacctccgctgactccgtgttccagattgcctgccatgaagaaactttcggtctggataaactctacgaactgtgcgaaatcgcccgtgaagagctgaccaacggcggctacaatatcggtcgtgttatcgctcgtccgtttatcggcgacaaagccggtaacttccagcgtaccggtaaccgtcacgacctggctgttgagccgccagcaccgaccgtgctgcagaaactggttgatgaaaaacacggccaggtggtttctgtcggtaaaattgcggacatctacgccaactgcggtatcaccaaaaaagtgaaagcgactggcctggacgcgctgtttgacgccaccatcaaagagatgaaagaagcgggtgataacaccatcgtcttcaccaacttcgttgacttcgactcttcctggggccaccgtcgcgacgtcgccggttatgccgcgggtctggaactgttcgaccgccgtctgccggagctgatgtctctgctgcgcgatgacgacatcctgatcctcaccgctgaccacggttgcgatccgacctggaccggtactgaccacacgcgtgaacacattccggtactggtatatggcccgaaagtaaaaccgggctcactgggtcatcgtgaaaccttcgcggatatcggccagactctggcaaaatattttggtacttctgatatggaatatggcaaagccatgttctgatggatttgggcggagcgttgactccgcctttgttatgtcacaaaaaggataaaacaatggctaccccacacattaatgcagaaatgggcgatttcgctgacgtagttttgatgccaggcgacccgctgcgtgcgaagtatattgctgaaactttccttgaagatgcccgtgaagtgaacaacgttcgcggtatgctgggcttcaccggtacttacaaaggccgcaaaatttccgtaatgggtcacggtatgggtatcccgtcctgctccatctacaccaaagaactgatcaccgatttcggcgtgaagaaaattatccgcgtgggttcctgtggcgcagttctgccgcacgtaaaactgcgcgacgtcgttatcggtatgggtgcctgcaccgattccaaagttaaccgcatccgttttaaagaccatgactttgccgctatcgctgacttcgacatggtgcgtaacgcagtagatgcagctaaagcactgggtattgatgctcgcgtgggtaacctgttctccgctgacctgttctactctccggacggcgaaatgttcgacgtgatggaaaaatacggcattctcggcgtggaaatggaagcggctggtatctacggcgtcgctgcagaatttggcgcgaaagccctgaccatctgcaccgtatctgaccacatccgcactcacgagcagaccactgccgctgagcgtcagactaccttcaacgacatgatcaaaatcgcactggaatccgttctgctgggcgataaagagtaattgtgtttcgctgcaaggcgattgccttgtgaagccggagcgggagactgctccggctttttagtatctattcatttttctctccagcttgaatattttcgctatacttttcagtgaaatgtgttaataaatctattcaagtatctattcacgaatctattcattaatgagcgagctgactgatcttttactgcaagggccgcgttctgccccggaattgcgccagcgtctggcaatcagtcaggcgacgttctcacgccttgttgccagagaagatcgggtgattcgctttggtaaagcacgggcaacgcgatatgcactgctgcgtccttatcgcggaattgagcgtattcccgtctggcgggtggacgataccggaaaggcgcataaattcgccgacatccggttgtgctggccgcagggaagttgtctggtaacaggcgcagatggcgacgaacagtggtttgatggtttgccctggtatttgaccgatctccgaccgcagggctttttagggcgcgcgtggggcaggaagttagccgcgcaactgaatctgactgatgatatacgtctctggcaggaagaagatgtgctctacgccctgaccgtatttaacggtgaatatactggcggttggttggtcggggaggggaattatcagcgatggattactgcacaacaccctgcggaaattcctctggatcaaaaactcacccattacgaacagctggcaagtgatgcactggcaggagaaattgtgggttcttctgcgggcggcgagcagccaaaatttacctactatgcacaaacgccgtcaggcaataaacatgtgttggtgaaattcaccgtaccacagcaaaccgcggtcagccaacgttggggtgacctgctaattgctgaatctattgccgcgcaaatcctgcgtgacggtgggatccacgccatcgagtcaacggtgcttgtaacaagtaacaggcaggtattcctcgaagcggaacgctttgactgcaaaggtaacgatggtcgcttgcctattgtgtcgctggaggcggtgcagagtgagtttatctcttctccgggatcgtggccgcaggcaatgcgccgtttgtgtgagcaacaacttgtcactcaccagagcgtggcgcaaacagaagtgatctgggcatttgggcgacttatcgccaacagcgatatgcacgcaggtaatttatcgttttatttatctgaaccgccatttgcgctgacgcccgtctacgacatgctgccgatggtctatgcaccaaacagcgctggaatgctgcgtgatgctgccattgaggtgaagtttgatcttaacgtcagtaaaagcgcttggttaacggcgatcccgctggcgcagcagttctggcaaacggtcgccagagatccgcgtatcagcgaggcgtttcgccacattgcgcaagaaatgccggaaaaaatccggcaaatcgaagagaaagttgcccgcatgggcgggtaactaccttacagcccccgccatccatgccgataactcccgtagctctttttcctgttccgggaagtcaaccaacagcgcttcgcactcctgttgcagcatatctgcgcggtacaggcagccttgcagtcgtccggcgagggcttccagcggcgcggggttgaggctgtcggtaaacacctgggcgcgggtgatatggcctttttcaacgtcgaaatgcagttccacgccgccccaggtaaagcgttcatccagcagatgcgagaatgccggagcctgaccgaagttccattcccagctactctggcgggcaaaggtttcggcgaagtttggcaagtctggcgttttgttcggggagatgatttccgcttccacgcgctcgccataatgggcgaaaaaggcctcggttatggcctcgcaaacctgctcatgggtgatccccggcaacagctcggtgaggttggtcacgcgggaacgtaccgacgtaatgcctttcgccgccagtttctttttatccggattgagatagtttgccaggcggctgaggtcggcattgagtagcaaggtgccgtggtggaagccgcgatctttggtttcgcgataggccgagcctgagactttgcggtcgccttcgacggttttcaccaccagatcgttacgtccggacgcttcggcgctgacgccgagcgcgttcagcgcattgagcacaatcgacgtggagatagttttatcgtactccggcttgccagccataaaggtaaagcaggtattgccgagatcgtggaacaccgcgccgccaccgctactgcgccgcgccaggcggacgttatcttcttccatccgccgggtattacactctttccacgggttctgcgcgcgaccaattactaccgtgtcggcattgcgccagagaaacagaacgcgctgcgtggcgggcatttggcgaaaaatacactcttccaccgccaggttaaaccacgggtcgtaagagtcagagatgagcaggcgtaatgtggacataacgatttcctttcttgtagtaatgggtcactcttttttctcgctttcttcctcttccggcaccggtttgctggcggttaacaggaagggcgattgctgccagcgggtgcgtttaccctgtagcagcgtgcgggtcagcactacaccgattgccagtgagagcagcaacatcaggcgtaaaatgttagtggtgttatccacctgttgggcttcggtggcgagcgtatgggtgtcgagtgtcaggcgcagatagccgagcggtccgtttttacccgcaattggctcgacaatctgctggttaaaatagccgcctgcttttttaccgtcgagcgccagccggtcgcgcacttcgacgctttcgccagaacgtgcgataagatcgccttgttcgtcatacacacccgcgtcgaggatacggctttcatccgttaactgatcgaggatcgcctgaatgcgtttttcatccggtgagtcggtacgcatcagcggtgcaacgttcagcgtcacctgacgcgccagggtgcgggccagttcttccagctgtggattacgctgtcgctggtggttttgactaaaccatgacgctccctgcatcagcgccactaacaaggcaagacagaacaggacaatcactgcccgatgcagccggaatttcagttttgtgcgagccatcttccaccctttgaaaatttgagacttaatgttgccagaagcaatggatacaaggtagcctcatgcgttattttccctgcttcgaacgattttacaggagccttaatgcctaacattacctggtgcgacctgcctgaagatgtctctttatggccgggtctgcctctttcattaagtggtgatgaagtgatgccactggattaccacgcaggtcgtagcggctggctgctgtatggtcgtgggctggataaacaacgtctgacccaataccagagcaaactgggtgcggcgatggtgattgttgccgcctggtgcgtggaagattatcaggtgattcgtctggcaggttcactcaccgcacgggctacacgcctggcccacgaagcgcagctggatgtcgccccgctggggaaaatcccgcacctgcgcacgccgggtttgctggtgatggatatggactccaccgccatccagattgaatgtattgatgaaattgccaaactggccggaacgggcgagatggtggcggaagtaaccgaacgggcgatgcgcggcgaactcgattttaccgccagcctgcgcagccgtgtggcgacgctgaaaggcgctgacgccaatattctgcaacaggtgcgtgaaaatctgccgctgatgccaggcttaacgcaactggtgctcaagctggaaacgctgggctggaaagtggcgattgcctccggcggctttactttctttgctgaatacctgcgcgacaagctgcgcctgaccgccgtggtagccaatgaactggagatcatggacggtaaatttaccggcaatgtgatcggcgacatcgtagacgcgcagtacaaagcgaaaactctgactcgcctcgcgcaggagtatgaaatcccgctggcgcagaccgtggcgattggcgatggagccaatgacctgccgatgatcaaagcggcagggctggggattgcctaccatgccaagccaaaagtgaatgaaaaggcggaagtcaccatccgtcacgctgacctgatgggggtattctgcatcctctcaggcagcctgaatcagaagtaattgctcgcccgccatcctgcgggcggcacagcattaacgaggtacaccgtggcaaaagctccaaaacgcgcctttgtttgtaatgaatgcggggccgattatccgcgctggcaggggcagtgcagtgcctgtcatgcctggaacaccatcaccgaggtgcgtcttgctgcgtcgccaatggtggcgcgtaacgagcgtctcagcggctatgccggtagcgccggggtggcaaaagtccagaaactctccgatatcagccttgaagagctgccgcgtttttccaccggatttaaagagttcgaccgcgtactaggcggcggcgtggtgccaggaagtgccattctgattggcggtaaccctggtgcggggaaatccacgctgctactgcaaacgctgtgcaaactggcccagcagatgaaaacgctgtatgtcaccggcgaagagtcgctgcaacaggtggcaatgcgcgctcatcgccttggcctgccgactgacaatctcaatatgttgtcggaaaccagcatcgaacagatctgcctgattgccgaagaagagcaaccgaagctgatggtaattgactcgatccaggtgatgcatatggcggatgtacagtcatcgcctggtagcgtggcgcaggtgcgtgaaacggcggcttatttgacacgcttcgccaaaacgcgcggtgtggcgattgtcatggtggggcacgtaaccaaagatggttcgctggctggcccgaaagtgctggaacactgtatcgactgttcggtgcttttggatggcgatgccgactcccgttttcgcaccttgcgcagccataaaaaccgcttcggcgcggtgaatgagctgggcgtcttcgcgatgaccgaacaggggctgcgtgaagtcagcaacccttcggcaattttcttaagtcgcggcgatgaagtgacctccggtagctcagtgatggtggtatgggaaggaacgcgtccactgctggtggagattcaggcgctggtcgatcactcgatgatggcgaacccacgccgcgtggcagtggggctggaacaaaaccgtctggcaatcctgctggctgtgttgcaccgtcacggtggtctgcaaatggccgatcaggatgtgtttgtgaacgtggtcggcggcgtgaaggtaaccgaaaccagtgccgacttagcgttactgctggcgatggtttccagcctgcgcgacagaccgctgccgcaggatctggtggtgtttggtgaagtcgggctggcaggggagatccgcccggtgcccagcggtcaggaacgaatctctgaagcggcgaaacacggttttcgccgggcgattgttccggcggctaacgtgccgaaaaaagcgccggaagggatgcagatttttggcgttaaaaaactctccgacgcgcttagcgtgttcgacgacttataatgagatatacggagggagatatgtcgtcatttgattacctgaaaactgccatcaagcaacagggctgcacgctacagcaggtagctgatgccagcggtatgaccaaagggtatttaagccagttactgaatgccaaaatcaaaagccccagcgcgcaaaagctggaggcgttgcaccgttttttggggcttgagtttccccggcagaagaaaacgatcggtgtcgtattcggtaagttctacccactgcataccggacatatctaccttatccagcgcgcctgtagccaggttgacgagctgcatatcattatgggttttgacgatacccgtgaccgcgcgttgttcgaagacagtgccatgtcgcagcagccgaccgtgccggatcgtctgcgttggttattgcaaacttttaaatatcagaaaaatattcgcattcatgctttcaacgaagagggcatggagccgtatccgcacggctgggatgtgtggagcaacggcatcaaaaagtttatggctgaaaaagggatccagccggatctgatctacacctcggaagaagccgatgcgccacagtatatggaacatctggggatcgagacggtgctggtcgatccgaaacgtacctttatgagtatcagcggtgcgcagatccgcgaaaacccgttccgctactgggaatatattcctaccgaagtgaagccgttttttgtgcgtaccgtggcgatccttggcggcgagtcgagcggtaaatccaccctggtaaacaaacttgccaatatcttcaacaccaccagtgcgtgggaatatggccgcgattatgtcttttcacacctcggcggtgatgagatcgcattgcagtattctgactacgataaaatcgcgctgggccacgctcaatacattgattttgcggtgaaatatgccaataaagtggcatttatcgataccgattttgtcaccactcaggcgttctgcaaaaagtacgaagggcgggaacatccgttcgtgcaggcgctgattgatgaataccgtttcgatctggtgatcctgctggagaacaacacgccgtgggtggcggatggtttacgcagcctcggcagttcggtggatcgcaaagagttccagaacttgctggtggagatgctcgaagagaacaatatcgaatttgtgcgggttgaagaggaagattacgacagtcgtttcctgcgctgcgtggaactggtgcgggagatgatgggggagcagagataaccgtgatgaaactgctcaaaggcgaggtataaaatgagtttttttgatgagttgaaaacctctctggaagaggctgtcgagattaaacaaggtttgaaaaaacctgcacgggtgacccgccacgaaattgaggatgctaaggctgttgtagaccggaaacggtgttcacgccgcatccggcattcggtgctcaatgcctgatgcgacgcttaccgcgtcttatcaggcctacagttttacaacgtattgaaattgctggttttgtaggccggataaggcgttcgcgccgcatccggcattttacgcattacttcgcaatacgcttgtacttgatacgcttcggctccagcgcgtctgcgcccagcgtgcgtttcttgtactcttcgtactcggtaaagttaccttcgaagaactcaactttaccttcatcctggtaatccagaatgtgcgtggcgatacggtcgaggaaccaacggtcgtgcgagataaccatcgcacagcccgggaactccagcagggcgttttccagcgcgcgcagggtttcgatatccaggtcgttggttggttcgtcgagcagcagcatgttgccgccaacctgcagcagcttcgccagatgcagacgaccgcgctcaccaccggagagttcaccaacgcgtttaccctgatcaacccctttaaagttaaagcggccaacgtaggcgcggcttggcatctcggtgttgccgatcttcatgatatccagcccgccggaaacttcttcccaaacggttttgctgttatccattgagtcacggaactgatcaaccgacgccagtttcaccgtttcacccaaagtgatggtgccgctgtccggctgttcctgaccagagatcatacggaacagggtcgatttacccgcaccgttcggaccgatgatcccgacgatcgctcctttcgggatcgagaagctcaggtcatcaatcagcagacgatcgccataggatttacgcaggttgctgacttccagcactttatcgcccagacgcggtccaggtggaataaacagttcgttggtttcgttacgtttctgatattcggtgctgttcagttcttcaaagcgcgccagacgtgctttacctttcgactgacggcctttagtaccttgacgtacccattccagctctttctcaatcgacttacgacgcgccgcttcttgtgaagcttcctgcgccaggcgctgatctttctgctccagccaggaggagtagttaccttcccacggaataccttcaccgcggtcaagttcgaggatccagcctgcaacgttatcgaggaagtaacggtcgtgggtaatcgccacaacggtgccttcgaagtcgtgcaggaagcgttccagccaggccacggattcggcatccaggtggttggtcggttcgtcgagcagcagcatgtctggtttttccagcagcaggcggcacaacgctacgcgacgacgttcaccaccggagaggttagcgattttcgcgtcccagtccggcagacgtagcgcatccgccgcacgctccagctgtacgttcagattatgaccgtcgtgagcctgaatgatctcttccagacggccttgttcagcggccagcttgtcaaaatcggcatccggatcggcgtacagcgcatacacttcatccaggcgtttcagggcgttaaccacttctgaaaccgcttcttcaatggactcacgcacggtgtgttccgggttcagctgcggttcctgcggcagataaccaatcttgatgtctggctgcggacgcgcttcaccttcgatgtctttatcaatgcccgccataatgcgcagcagggtggacttacccgcgccattcagacccaggacaccaatttttgccccagggaagaaactcagagagatgtttttcaaaatatgacgtttcggcggaacaactttgccgacacgatgcatggtataaacgaattgagccacgttggacttcgcctctatgtttatcgtgataatgagttttcaaaggcgaagtgtagcctttttccccgcctaatcccagccggtcgatcaccctcgcagtaaaagtaaaaaagtgtccgtaacgtggcgtaaacggcaatgactggttagcataaatctattacgcggcatgacgctgcattgatgtatttacacttagaggatgcgcttgtggaaaaagccaaacaagttacctggcggctgttggctgccggtgtctgtctgctgacggtcagcagcgtggcgcgagccgactcactggatgagcagcgtagtcgttacgcgcaaatcaagcaggcctgggataatcgacaaatggatgtggtcgaacaaatgatgcctggactgaaggattatccgctttatccctacctggaataccgccagatcaccgatgatctgatgaatcaaccggcggtgacggtcactaactttgttcgcgctaaccccacgcttcctcccgctcgcacgctgcaatctcgtttcgtcaatgaactggcgcggcgtgaagactggcgtggcttgttagcctttagcccggaaaagcccggaactaccgaagcgcaatgtaattactactatgcgaaatggaacaccgggcagagtgaagaagcctggcaaggggcgaaagagctgtggctaaccggcaagagccagcctaacgcctgtgacaagttatttagcgtctggcgtgcgtcaggtaaacaagatccgctggcgtatttagagcgtatccgtctggcgatgaaagcgggtaacacaggcctggtaacagtgctggcagggcagatgcctgccgattaccagactatcgcctcggcaatcatttcactggcgaacaaccctaatacggtactgaccttcgcgcgtacaactggcgcgaccgattttacccgtcaaatggcggcggtggcgtttgccagtgtggcgcggcaggatgctgagaatgcacggctgatgatcccatcgcttgcccaggcgcagcagcttaatgaagatcagattcaggagctgcgcgatatcgtcgcctggcgtttgatgggcaacgatgtcaccgacgagcaggcgaaatggcgcgatgacgccattatgcgctcgcaatctacttcgcttattgaacgccgtgtacgaatggcgcttggcaccggcgatcgtcgcggcctgaatacctggctggcgcgtctgcctatggaagcgaaagagaaagatgaatggcgttactggcaggcggatttattgctggaacgcggacgtgaagctgaagcaaaagagattttgcatcaactcatgcaacagcgtggtttctacccgatggttgcagcacaacgcatcggcgaagagtatgagctgaagattgataaagcgccgcagaatgttgacagcgccctgactcaggggccggagatggcgcgcgtgcgcgagttgatgtactggaatctcgataataccgcgcgtagcgagtgggccaatctggtgaagagcaagtcaaaaacagagcaggctcaactggcgcggtatgctttcaacaaccaatggtgggatcttagcgttcaggcaacgatcgccgggaagctgtgggatcatctggaagagcgattcccgctggcttacaacgatcttttcaaacgctacaccagcggtaaggagatcccgcaaagctatgcgatggcgattgctcgtcaggagagcgcctggaatccgaaagtgaaatcaccggtaggggccagcggcttgatgcagattatgcctggtacagcgacccatacggtgaagatgttctctattcccggttatagcagtcctgggcaattgctggatccggaaacgaatatcaacattggcaccagttacctgcaatatgtttatcagcagtttggcaataatcgtattttctcctcagcagcttataacgccggaccagggcgggtgcgaacctggcttggcaacagcgccgggcgtatcgacgcagtggcatttgtcgagagtattccattctccgagacgcgcggttatgtgaagaacgtgctggcttatgacgcttactaccgctatttcatgggggataaaccgacgttgatgagcgccacggaatggggacgtcgttactgatccgcacgtttatgatatgctatcgtactctttagcgagtacaaccgggggaggcattttgcttcccccgctaacaatggcgacatattatggcccaacaatcaccctattcagcagcgatggcagaacagcgtcaccaggagtggttacgttttgtcgacctgcttaagaatgcctaccaaaacgatctccatttaccgttgttaaacctgatgctgacgccagatgagcgcgaagcgttggggactcgcgtgcgtattgtcgaagagctgttgcgcggcgaaatgagccagcgtgagttaaaaaatgaactcggcgcaggcatcgcgacgattacgcgtggatctaacagcctgaaagccgcgcccgtcgagctgcgccagtggctggaagaggtgttgctgaaaagcgattgattttgtaggcctgataagacgtggcgcatcaggcatcgtgcaccgaatgccggatgcggcgtgaacgccttatccgtcctacaaatacccgtaatttcaatatgtttggtaggcatgataagacgcggcagcgtcgcatcaggcgcttaatacacggcattatgaaacggactcagcgccaggatcaccgcctggtgatagacgctggcgcgagtgagtttcccggcggtaaacacgccgatcgccccttccttacgaccaatctcatcaataccggtataacgcgacatcacgggaccaagcgcctcaccttcacgcactttttccagaatcaccgcaggcaacggcaaagtagccgaacgcgcctcgccgcgctggctggcgttttcaatcaccacccaactgaaagtgctgtcaccatcgatgccagcttcaatcgccacccaaaaatcagcctctggaagtaaacggcgggcattggctacccgatttcgtgcgccagcgcgcgtttcctcactgccaaagggctgttccggtacaccgctctcgacggcaacggatgcaatatggcaggatccttcgccgaagatctcgtgaaatgcctgcagaatggcctgaattttagcgggattggtggtcgcacagacaacttggtgcataatcagcattactcagaaaattaacgttacagcagtatacggaaaaaaagcatgttacaggtatacctagtccgccacggtgaaacgcagtggaacgccgagcgacgtattcagggccagtctgacagcccgctgaccgccaaaggtgagcaacaggcgatgcaggtggcaacccgtgccaaagagcttggcattacgcatatcatcagtagcgatttaggacgcacccggcgtacggcggaaatcatcgcccaggcctgcggctgtgacatcatctttgattctcgcctgcgtgaattaaacatgggtgtgctggaaaaaagacatatcgattctctgaccgaagaagaagagaactggcgtcggcagctggtcaatggcaccgttgacgggcgtattcctgaaggcgagtcaatgcaggagctcagcgatcgcgtcaatgcggcactggaatcttgccgggacttaccgcagggaagccgaccgctgctggtgagtcatggtattgcactgggatgcctggtgagtacgattctcggattaccagcatgggcagagcgccgcttacgtctgcgtaactgttctatttcgcgcgtggattatcaggaaagcctgtggctggcgtctggctgggtcgttgaaaccgcaggggacatctcgcatctggacgcccctgcattagatgagctgcagcgttaacgacggatcggaatcagcagttcacagcgtagattaattgggcgatctcccgctttggcatcttctgccgggtagtatcgctcaatatcctgacctttacggcgcgtcaggttgagcattggcatgcacgttccgtataccgtcaggataaactcctgcacgccggttcccagaccttcataggtaaacatcacatattcgccgccctgcagcatcaccggatgccccgtcagtacatagccatctgcctgatcctgggctaacgcggtggtatagaatacctcttgctcgtcgtctttatcctgactcggacgcgtttcattcaggccgtagagcaccggcggaatggtcggcgcgttgccgagaaaatcgtgccagaactgataacgcatttcatggcggaaatcagagatttgctccagcgaacaggagtagctctgggtaacaccaatcagcggcgtatcttccagggtgacaaatttgtgctctggcatagtgaattcacccaggcgtagcggcgggcgaataccaaaggcgctccattcaggagaacggcggtaaagtgcaggagtctgggcaaactgcttcttgaatgcgcgggtaaatgtctgttgagagtcgaagcggtattgcagcgcgatgtccagaatcggacgcgcagtcaggcgtagtgcgaccgccgatttcgacaaacgacgagcacgaatatacgcgccaatagcatggccagtgacatctttaaacattctctgtaagtgccacttggaataacctgctttcgccgctacattgtcgagcgacaggggctgatccagatgaccttccagccagattaaaaggtcgcgaataatgccggcctgatccataaaatatcctcatcctttcaacaacgagcacctgacatcaggtaattggataatagcattttttgctgttttagcattcagtgtttttttcttagtagagtatgttttagggcttgacggaaataaaagtattgagattttgttcttaatcaatatgttatttaccgtgacgaactaattgctcgtgtaatagataaaaatggtaacaatatgaaatacaagcatttgatcctgtctttaagcctgataatgctggggccattggctcatgcagaagagattggttcggtcgacaccgtatttaaaatgatcggcccggatcacaaaattgttgtggaagcctttgatgatcccgatgtgaaaaatgtcacctgttatgtgagccgggcgaaaaccggtggtattaaagggggattgggtctggcggaagatacctccgatgcggccatttcttgtcagcaagtcgggccgattgaactgtcggatcgtattaaaaacggcaaagctcagggcgaggtagtattcaaaaaacgcacgtccctggtctttaagtcgttacaggtcgtgcgcttttatgatgccaaacgcaacgcgctcgcttatctggcttactccgacaaagttgtagaaggttcgccgaaaaacgcgattagcgcggttcctgtcatgccgtggcggcaataacagaggcgatttatgcaacgggaaacggtctggttagtggaagatgagcaagggatagccgacacgctggtctacatgttgcagcaggaaggttttgccgtcgaggtctttgagcgaggcttgccggtgctggataaagctcgcaagcaggtacccgacgtcatgattctcgatgttggtctgccggatattagcggctttgaattgtgccgccagttactggcgctccatccggcgttacctgtactgttcctgacggcccgaagtgaagaggtcgatcgcctgcttgggctggaaattggtgctgacgactacgtggctaaaccgttttcaccccgcgaagtgtgcgccagggtgcgcaccttactgcgtcgggtgaagaagttctcgacgccgtctcccgtcatccgtattggacattttgaattgaatgaacccgcggcgcagatcagctggtttgacacgccattagcgctgactcggtatgagtttttattgttgaagacgttactcaagtcaccgggccgcgtctggtcccgccagcaactgatggatagcgtatgggaagatgcgcaggacacctacgatcgcaccgtcgatacccacattaaaacgctgcgtgccaagctgcgcgccatcaaccccgatctttcaccgattaatactcatcgcggcatgggatatagcctgaggggcctgtaatgcgtatcggcatgcggttgttgctgggctattttttactggtggcggtggcagcctggttcgtactggccatttttgtcaaagaagttaaaccgggcgtgcgaagagcaacggaggggacgttgatcgacaccgcaacgttgctggcggagctggcgcgtcccgatttgctctctggggacccaacgcatgggcaactggcgcaggcgtttaatcagctacaacatcgcccgtttcgcgccaatatcggtggcattaacaaagtgcgcaatgaatatcatgtctatatgaccgatgcgcagggcaaagtattgttcgattcggcaaataaagccgttggacaggattattcgcgctggaatgacgtctggctaacgttgcgtggtcagtatggtgcgcgcagcacgttgcaaaatcctgccgatcccgaaagttctgtgatgtatgttgccgcaccgattatggacggctcgcggcttattggcgttttgagcgtaggcaaaccgaacgcggcgatggctccggtcattaagcgtagcgagcggcgaattttatgggccagcgccattttgttggggattgcactggtgattggcgcaggcatggtttggtggatcaaccgctctattgcccggctcactcgctatgctgattccgtcactgacaataagcccgttcctctccccgatctcggtagtagcgagttgcgtaaactcgcgcaggcgctggaaagtatgcgcgtgaagctggaagggaaaaactatattgagcagtatgtttacgcattaactcatgagctaaaaagcccactggcggcgattcgtggagcggcggaaattttacgcgaaggtccgccgccggaagtggtggctcgttttactgacaacattctgacgcaaaatgcgcgtatgcaggcattggtagaaacgttactacgccaggcaagactggagaatcgtcaggaagtcgttctgactgctgttgatgtggcggcattattccgccgcgtcagcgaagcgcgcaccgtgcagttggcagaaaaaaaaatcactctgcatgttacgcccaccgaggttaacgttgctgctgaaccggcgttactggagcaggcgctgggaaatttactggataacgccatcgattttacccccgagagcggttgcatcacgctaagcgccgaagtggatcaggaacacgtcacgcttaaggtgctggataccggtagtggtattcctgactacgcgctttcacgtatttttgaacgcttttactctttgcctcgtgcaaatgggcaaaaaagcagcggtctggggttggcgttcgtcagtgaggtcgcccgtttgtttaacggcgaagtcacgctgcgcaacgtgcaggaaggtggcgtgctggcctcgcttcgacttcaccgtcacttcacatagcttcaaattcttcccacatagtcttcgtatcctgctgccattgcaaaggagaagactatgttgaaatcccccctgttctggaaaatgactagcctgtttggtgcagtattgctgttgttgattccgataatgctgattcggcaggtgattgtcgaacgtgctgattaccgtagcgatgtggaagatgcgattcgccaaagtaccagcgggccgcaaaaactcgttgggccgctcatcgctattcctgtgaccgagctttatacggtgcaggaagaggataaaaccgtggagcggaaacgaagttttatccatttttggttacctgagtcattgatggttgatggcaatcagaacgtggaagaacgcaagatagggatttataccggtcaggtctggcacagtgatttaacgttaaaagccgatttcgatgtttcgcgtcttagcgaactcaacgcgccaaatatcaccttaggcaagccatttattgtgattagcgtcggggatgcgcgtggtattggtgtggtgaaagcgcctgaagttaacggaacggcgctgaccattgaacccggcaccgggttagagcaaggcgggcagggcgtgcatatccctttacctgaaggggactggcggaagcagaacctgaagctgaatatggccctgaatttaagcggtaccggcgatctttctgtggtgcctggcgggcgtaatagcgaaatgaccttaaccagcaactggccgcatcccagttttttaggtgattttctaccagccaaacgggaagttagcgagtcaggttttcaggcgcactggcaaagcagctggtttgctaataatctcggtgagcgttttgcttcaggcaatgataccggctgggaaaacttcccggcgtttagcgtcgcagtaacgacgccagccgatcaataccaattaactgaccgggcgactaagtacgccattctgctgattgcactgacttttatggcgttctttgtttttgaaacgctcaccgcgcaacgtttacacccaatgcaatatttgctggtggggctttcattggtgatgttttatttgctcttgctggcgctttctgaacataccggttttaccgtggcatggataatcgccagtctgattggggcgataatgaacggtatttatttgcaagcggtattgaaaggttggtgcaacagcatgttgtttaccctcgcgctgttgttgctggatggtgtgatgtggggactgctcaactctgccgatagcgcgctgttgttgggaaccagtgtgctggtggtggcgctggccggcatgatgtttgtgacccgtaatatcgactggtatgcgttttcactgccgaaaatgaaagccagtaaagaagttacaacggacgatgagttacgtatctggaaataaggttgaaaaataaaaacggcgctaaaaagcgccgttttttttgacggtggtaaagccgattaatcttccagatcaccgcagaagcgataaccttcaccgtgaatggtggcgatgatttccggcgtatccggcgtagattcgaaatgtttacgaatacggcggatcgtcacgtctacagtacggtcgtgcggtttcagctcacggccggtcattttcttcagcagttcagcacgggactgaattttgcctgggttttcacagaagtgaagcatggcgcggaactcgctgcgcggcagcttgtactgctcgccatcagggccgatcaacgaacggctgttgatgtccagttcccaaccattgaacttgtagctttcaacgctacgacgttcttcgctgacagtacccagattcatggtacgggacagtaggttgcgtgcacgaatcgtcagttcacgcgggttgaacggtttggtgatgtagtcatctgcaccgatttcgaggccgagaattttatcgacttcgttgtcacggccagtcaggaacatcaacgcaacattcgcctgctcgcgcagttcacgcgctaacagaagaccgttcttacccggcagattgatatccatgatcaccaggttgatgtcatattcagagaggatctgatgcatttccgcgccatctgtcgcttcgaaaacatcatagccttccgcttcgaaaatacttttcaacgtgttgcgtgttaccaactcgtcttcaacgataagaatgtgcggggtctgcatgtttgctacctaaattgccaactaaatcgaaacaggaagtacaaaagtccctgacctgcctgatgcatgctgcaaattaacatgatcggcgtaacatgactaaagtacgtaattgcgttcttgatgcactttccatcaacgtcaacaacatcattagcttggtcgtgggtactttccctcaggacccgacagtgtcaaaaacggctgtcatcctaaccattttaacagcaacataacaggctaagaggggccggacacccaataaaactacgcttcgttgacatatatcaagttcaattgtagcacgttaacagtttgatgaaatcatcgtatctaaatgctagctttcgtcacattattttaataatccaactagttgcatcatacaactaataaacgtggtgaatccaattgtcgagatttattttttataaaattatcctaagtaaacagaaggatatgtagcattttttaacaactcaaccgttagtacagtcaggaaatagtttagccttttttaagctaagtaaagggctttttctgcgacttacgttaagaatttgtaaattcgcaccgcgtaataagttgacagtgatcacccggttcgcggttatttgatcaagaagagtggcaatatgcgtataacgattattctggtcgcacccgccagagcagaaaatattggggcagcggcgcgggcaatgaaaacgatggggtttagcgatctgcggattgtcgatagtcaggcacacctggagccagccacccgctgggtcgcacatggatctggtgatattattgataatattaaagttttcccgacattggctgaatcgttacacgatgtcgatttcactgtcgccaccactgcgcgcagtcgggcgaaatatcattactacgccacgccagttgaactggtgccgctgttagaggaaaaatcttcatggatgagccatgccgcgctggtgtttggtcgcgaagattccgggttgactaacgaagagttagcgttggctgacgttcttactggtgtgccgatggtggcggattatccttcgctcaatctggggcaggcggtgatggtctattgctatcaattagcaacattaatacaacaaccggcgaaaagtgatgcaacggcagaccaacatcaactgcaagctttacgcgaacgagccatgacattgctgacgactctggcagtggcagatgacataaaactggtcgactggttacaacaacgcctggggcttttagagcaacgagacacggcaatgttgcaccgtttgctgcatgatattgaaaaaaatatcaccaaataaaaaacgccttagtaagtatttttcagcttttcattctgactgcaacgggcaatatgtctctgtgtggattaaaaaaagagtgtctgatagcagcttctgaactggttacctgccgtgagtaaattaaaattttattgacttaggtcactaaatactttaaccaatataggcatagcgcacagacagataaaaattacagagtacacaacatccatgaaacgcattagcaccaccattaccaccaccatcaccattaccacaggtaacggtgcgggctgacgcgtacaggaaacacagaaaaaagcccgcacctgacagtgcgggctttttttttcgaccaaaggtaacgaggtaacaacc

SEQ ID NO: 2 - DNA, 21 bp, Artificial Sequence
  Description of Artificial Sequence: Synthetic DNA
tgtggagcaaaatcttccagc

SEQ ID NO: 3 - DNA, 49 bp, Artificial Sequence
  Description of Artificial Sequence: Synthetic DNA
acccagcctgcgcgagcaggggaatgttattttctcttcattacacgta

SEQ ID NO: 4 - DNA, 25 bp, Artificial Sequence
  Description of Artificial Sequence: Synthetic DNA
taataatttaaattggaataagctt

SEQ ID NO: 5 - DNA, 46 bp, Artificial Sequence
  Description of Artificial Sequence: Synthetic DNA
gatcaccaaggtagtcggcaaataaatgtgatgagccgttcatgat

SEQ ID NO: 6 - DNA, 53 bp, Artificial Sequence
  Description of Artificial Sequence: Synthetic DNA
ttatttgccgactaccttggtgatcgatcctttttaacccatcacatatacct

SEQ ID NO: 7 - DNA, 51 bp, Artificial Sequence
  Description of Artificial Sequence: Synthetic DNA
cgtgccgatcaacgtctcataaaaggttaggaatacggttagccatttgcc

SEQ ID NO: 8 - DNA, 51 bp, Artificial Sequence
  Description of Artificial Sequence: Synthetic DNA
ggcaaatggctaaccgtattcctaaccttttatgagacgttgatcggcacg

SEQ ID NO: 9 - DNA, 45 bp, Artificial Sequence
  Description of Artificial Sequence: Synthetic DNA
attcccctgctcgcgcaggctgggttgaatttctgccattcatcc

SEQ ID NO: 10 - DNA, 25 bp, Artificial Sequence
  Description of Artificial Sequence: Synthetic DNA
ttatttgccgactaccttggtgatc

SEQ ID NO: 11 - DNA, 25 bp, Artificial Sequence
  Description of Artificial Sequence: Synthetic DNA
attcccctgctcgcgcaggctgggt

SEQ ID NO: 12 - DNA, 26 bp, Artificial Sequence
  Description of Artificial Sequence: Synthetic DNA
ggaatatcagacgggttttgcgaaac

SEQ ID NO: 13 - DNA, 25 bp, Artificial Sequence
  Description of Artificial Sequence: Synthetic DNA
ctacgcgtcacagcctcaacacttt

SEQ ID NO: 14 - DNA, 45 bp, Artificial Sequence
  Description of Artificial Sequence: Synthetic DNA
atcatgaacggctcatcacatgttattttctcttcattacacgta

SEQ ID NO: 15 - DNA, 45 bp, Artificial Sequence
  Description of Artificial Sequence: Synthetic DNA
tacgtgtaatgaagagaaaataacatgtgatgagccgttcatgat

SEQ ID NO: 16 - DNA, 25 bp, Artificial Sequence
  Description of Artificial Sequence: Synthetic DNA
ccggtccataaggccggggtttttt

SEQ ID NO: 17 - DNA, 52 bp, Artificial Sequence
  Description of Artificial Sequence: Synthetic DNA
gtgctacgcctgaataagtgcggccgcataacctgattacctcactacatac

SEQ ID NO: 18 - DNA, 25 bp, Artificial Sequence
  Description of Artificial Sequence: Synthetic DNA
atcacaaggtgccagcagctgatcg

SEQ ID NO: 19 - DNA, 54 bp, Artificial Sequence
  Description of Artificial Sequence: Synthetic DNA
cgcaaaagaaaatgccgatttgcggccgctaatcttctgtgatagtcgatcgtt

SEQ ID NO: 20 - DNA, 50 bp, Artificial Sequence
  Description of Artificial Sequence: Synthetic DNA
cgtgccgatcaacgtctcatatgaggcaatcctaatctctaagttaccgc

SEQ ID NO: 21 - DNA, 54 bp, Artificial Sequence
  Description of Artificial Sequence: Synthetic DNA
gcggccgcaaatcggcattttcttttgcgaagagtgtctgatagcagcttctga

SEQ ID NO: 22 - DNA, 52 bp, Artificial Sequence
  Description of Artificial Sequence: Synthetic DNA
gcggccgcacttattcaggcgtagcacatgagtgaatttctgccattcatcc

SEQ ID NO: 23 - DNA, 50 bp, Artificial Sequence
  Description of Artificial Sequence: Synthetic DNA
gcggtaacttagagattaggattgcctcatatgagacgttgatcggcacg

SEQ ID NO: 24 - DNA, 25 bp, Artificial Sequence
  Description of Artificial Sequence: Synthetic DNA
cgatcttgaaagcaaacgtgaagtg

SEQ ID NO: 25 - DNA, 25 bp, Artificial Sequence
  Description of Artificial Sequence: Synthetic DNA
tgatggtgccgcgcggcagattaaa

SEQ ID NO: 26 - DNA, 25 bp, Artificial Sequence
  Description of Artificial Sequence: Synthetic DNA
ttatcgacttcgttgtcacggccag

SEQ ID NO: 27 - DNA, 53 bp, Artificial Sequence
  Description of Artificial Sequence: Synthetic DNA
aagatgattgcgtaatcagcaccacgaaaatacgggcgcgtgacatcgctgca

SEQ ID NO: 28 - DNA, 53 bp, Artificial Sequence
  Description of Artificial Sequence: Synthetic DNA
tgcagcgatgtcacgcgcccgtattttcgtggtgctgattacgcaatcatctt

SEQ ID NO: 29 - DNA, 25 bp, Artificial Sequence
  Description of Artificial Sequence: Synthetic DNA
cgcttcgttgacatatatcaagttc

SEQ ID NO: 30 - DNA, 53 bp, Artificial Sequence
  Description of Artificial Sequence: Synthetic DNA
ggttgttacctcgttacctttggtcgaaaaaaaaagccccgcactgtcaggtg

SEQ ID NO: 31 - DNA, 53 bp, Artificial Sequence
  Description of Artificial Sequence: Synthetic DNA
cacctgacagtgcggggctttttttttcgaccaaaggtaacgaggtaacaacc
